(19) United States
(12) Patent Application Publication
(10) Pub. No.: US 2013/0097734 A1
(43) Pub. Date: Apr. 18, 2013

(54) LATE BLIGHT RESISTANCE GENES

(71) Applicants: Sophien Kamoun, Norwich (GB); Maria Eugenia Segretin, Buenos Aires (AR); Sebastian Schornack, Norwich (GB)

(72) Inventors: Sophien Kamoun, Norwich (GB); Maria Eugenia Segretin, Buenos Aires (AR); Sebastian Schornack, Norwich (GB)

(73) Assignee: TWO BLADES FOUNDATION, Evanston, IL (US)

(21) Appl. No.: 13/547,198

(22) Filed: Jul. 12, 2012

Related U.S. Application Data
(60) Provisional application No. 61/506,829, filed on Jul. 12, 2011.

(51) Int. Cl. C12N 15/82

(52) U.S. Cl. CPC C12N 15/8282
USPC 800/301; 536/23.6; 435/320.1; 435/418; 435/6.11; 435/4; 506/10; 800/279; 530/350

(57) ABSTRACT

Nucleic acid molecules that confer to a plant resistance to the plant pathogenic Phytophthora species are provided. These nucleic acid molecules can be introduced into plants that are otherwise susceptible to infection by certain strains of Phytophthora infestans or other Phytophthora species in order to enhance the resistance of the plant to this plant pathogen. Also provided are the resistance proteins encoded by these nucleic acid molecules. Methods of making nucleic acid molecules that confer upon a plant resistance to a plant pathogen, the nucleic acid molecules made by these methods, the resistance proteins encoded thereby, and methods of using these nucleic acid molecules to increase the resistance of plants to pathogens are further provided.

### CROSS-REFERENCE TO RELATED APPLICATION

[0001] This application claims the benefit of U.S. Provisional Patent Application No. 61/506,829, filed Jul. 12, 2011, herein incorporated by reference in its entirety.

### REFERENCE TO A SEQUENCE LISTING SUBMITTED AS A TEXT FILE VIA EFS WEB

[0002] The official copy of the sequence listing is submitted electronically via EFS-Web as an ASCII formatted sequence listing with a file named 422128SEQLIST.TXT, created on Jul. 12, 2012, and having a size of 760 kilobytes, and is filed concurrently with the specification. The sequence listing contained in this ASCII formatted document is part of the specification and is herein incorporated by reference in its entirety.

### BACKGROUND OF THE INVENTION

[0003] Plants are hosts to thousands of infectious diseases caused by a vast array of phytopathogenic fungi, bacteria, viruses, oomycetes, and nematodes. Plants recognize and resist many invading phytopathogens by inducing a rapid defense response. Recognition is often due to the interaction between a dominant or semi-dominant resistance (R) gene product in the plant and a corresponding dominant avirulence (Avr) gene product expressed by the invading phytopathogen. R-gene triggered resistance often results in a programmed cell-death, that has been termed the hypersensitive response (HR). The HR is believed to constrain spread of the pathogen.

[0004] How R gene products mediate perception of the corresponding Avr proteins is mostly unclear. It has been proposed that phytopathogen Avr products function as ligands, and that plant R products function as receptors. In this receptor-ligand model binding of the Avr product to a corresponding R product in the plant initiates the chain of events within the plant that produces HR leads to disease resistance. In an alternate model the R protein perceives the action rather than the structure of the Avr protein. In this model the Avr protein is believed to modify a plant target protein (pathogenicity target) in order to promote pathogen virulence. The modification of the pathogenicity protein is detected by the matching R protein and triggers a defense response. Experimental evidence suggests that some R proteins act as Avr receptors while others detect the activity of the Avr protein.

[0005] The production of transgenic plants carrying a heterologous gene sequence is now routinely practiced by plant molecular biologists. Methods for incorporating an isolated gene sequence into an expression cassette, producing plant transformation vectors, and transforming many types of plants are well known. Examples of the production of transgenic plants having modified characteristics as a result of the introduction of a heterologous transgene include: U.S. Pat. No. 5,719,046 to Guerineau (production of herbicide resistant plants by introduction of bacterial dihydropteroate synthase gene); U.S. Pat. No. 5,231,020 to Jorgensen (modification of flavenoids in plants); U.S. Pat. No. 5,583,021 to Dougherty (production of virus resistant plants); and U.S. Pat. No. 5,767,372 to De Greve and U.S. Pat. No. 5,500,365 to Fischoff (production of insect resistant plants by introducing Bacillus thuringiensis genes).

[0006] In conjunction with such techniques, the isolation of plant R genes has similarly permitted the production of plants having enhanced resistance to certain pathogens. Since the cloning of the first R gene, Pto from tomato, which confers resistance to Pseudomonas syringae pv. tomato (Martin et al. (1993) Science 262: 1432-1436), a number of other R genes have been reported (Hammond-Kosack & Jones (1997) Ann. Rev. Plant Physiol. Plant Mol. Biol. 48:575-607). A number of these genes have been used to introduce the encoded resistance characteristic into plant lines that were previously susceptible to the corresponding pathogen. For example, U.S. Pat. No. 5,571,706 describes the introduction of the N gene into tobacco lines that are susceptible to Tobacco Mosaic Virus (TMV) in order to produce TMV-resistant tobacco plants. WO 95/28423 describes the creation of transgenic plants carrying the Rps2 gene from Arabidopsis thaliana, as a means of creating resistance to bacterial pathogens including Pseudomonas syringae, and WO 98/02545 describes the introduction of the Prf gene into plants to obtain broad-spectrum pathogen resistance. More recently, the Bs2 and Bs3 genes from pepper, which confer resistance to bacterial spot disease caused by the phytopathogenic bacterium Xanthomonas campestris pv. vesicatoria (Xcv), have been isolated and sequenced, and transgenic plants expressing these genes have been shown to produce a hypersensitive response when challenged with the strains of Xcv expressing the corresponding avirulence genes (U.S. Pat. No. 6,262,343; U.S. Pat. Pub. No. 2009/0133158).

[0007] Late blight is one of the most devastating diseases affecting potato (Solanum tuberosum) production worldwide. This disease is caused by the oomycete plant pathogen, Phytophthora infestans. To combat this plant pathogen, potato breeders have introduced at least 11 late blight resistance (R) alleles from Solanum demissum into the cultivated potato (Gebhardt and Valkonen (2001) Annu. Rev. Phytopathol. 39:79-102). The products of R alleles recognize the products of corresponding Avr alleles in races of P. infestans, triggering disease resistance and HR. Recently, the first Avr gene (Avr3a) was identified in P. infestans (Armstrong et al. (2005) PNAS 102:7766-7771). R3a, a resistance protein discovered in potato, can trigger a hypersentive response response upon the recognition of the avirulence effector AVR3a^{KI} from P. infestans but cannot recognize AVR3a^{EM}, the product of another allele that is predominant in pathogen populations. To date, all the characterized P. infestans strains in nature produce at least one of these AVR3a proteins.

### BRIEF SUMMARY OF THE INVENTION

[0008] The present invention provides nucleic acid molecules for resistance (R) genes that are modified versions of the R3a resistance gene of potato (Solanum tuberosum L.). The R3a resistance gene is known to confer upon a plant resistance to strains of the oomycte pathogen, Phytophthora infestans, that produce the AVR3a^{KI} effector protein. The R genes of the present invention encode modified R3a resistance proteins, which display altered specificity for effector proteins from Phytophthora infestans and which are capable of causing a hypersensitive response in a plant when expressed in a plant in the presence of a Phytophthora infestans strain that produces the AVR3a^{EM} effector protein. Thus, in one embodiment, the present invention provides nucleic acid molecules comprising a nucleotide sequence encoding a modified R3a protein that is capable of inducing a hypersensitive response in a plant in the presence of AVR3a^{EM}. Preferably, the modified R3a proteins encoded by such nucleic acid molecules also retain the function of the wild-type R3a protein of inducing a hypersensitive response in a plant in the presence of AVR3a^{KI}.

[0009] The present invention further provides plants comprising in their genomes one or more heterologous polynucleotides of the invention. The heterologous polynucleotides of the invention comprise a nucleotide sequence encoding a modified R3a protein of the invention and can further comprise an operably linked to promoter capable of driving expression of the nucleotide sequence in a plant. The modified R3a proteins of the invention are capable of inducing a hypersensitive response in a plant in the presence of AVR3a^{EM} and are encoded the nucleic acid molecules of the invention. Preferably, the modified R3a proteins are also capable of inducing a hypersensitive response in a plant in the presence of AVR3a^{KI}.

[0010] The present invention provides methods for enhancing the resistance of a plant to Phytophthora infestans. In one embodiment, the methods involve transforming a plant cell, particularly a potato or tomato cell, with a polynucleotide comprising a nucleotide sequence encoding a modified R3a protein of the invention, wherein the modified R3a protein is capable of inducing a hypersensitive response in a plant in the presence of AVR3a^{EM} and preferably is also capable of inducing a hypersensitive response in a plant in the presence of AVR3a^{KI}. The methods can further involve regenerating a transformed plant from the transformed cell, wherein the transformed plant comprises enhanced resistance to at least one strain of Phytophthora infestans.

[0011] In another embodiment, the methods for enhancing the resistance of a plant to Phytophthora infestans of the present invention involve enhancing the resistance of a potato plant to Phytophthora infestans. Such methods comprise altering the coding sequence of the R3a gene in a potato plant or cell, whereby the altered coding sequence encodes a modified R3a protein of the invention that comprises an amino acid sequence having at least one amino acid substitution relative to the amino acid sequence of the R3a protein encoded by the R3a gene, wherein the modified R3a protein is capable of inducing a hypersensitive response in a plant in the presence of AVR3a^{EM}. Preferably, the modified R3a protein is also capable of inducing a hypersensitive response in a plant in the presence of AVR3a^{KI}. The coding sequence can, for example, be modified in vivo by targeted mutagenesis, homologous recombination, or mutation breeding. The methods can further involve regenerating a potato plant from the potato cell, wherein the regenerated potato plant comprises enhanced resistance to at least one strain of Phytophthora infestans.

[0012] The present invention additionally provides methods of selecting a potato plant for enhanced resistance to Phytophthora infestans. The methods involve screening one or more potato plants or parts or cells thereof either for a nucleotide sequence encoding a modified R3a protein or for a modified R3a protein, wherein the modified R3a protein is capable of inducing a hypersensitive response in a plant in the presence of AVR3a^{EM}, and selecting a potato plant comprising the nucleotide sequence encoding a modified R3a protein or the modified R3a protein.

[0013] The present invention further provides methods for making R proteins with altered recognition specificity for an effector protein of a plant pathogen. The methods comprise substituting at least one amino acid in the amino sequence of an R protein with a different amino acid, so as to produce a modified R protein. Prior to being modified, the R protein is capable of causing a hypersensitive response when the unmodified R protein is present in a plant with a first effector protein but is not capable of causing a hypersensitive response when the unmodified R protein is present in a plant with a second effector protein. The modified R protein is capable of causing a hypersensitive response when the modified R protein is present in a plant with the second effector protein and preferably is also capable of hypersensitive response when the modified R protein is present in a plant with the first effector protein. Typically, the methods involve altering the coding sequence of the R protein, whereby the altered coding sequence encodes an amino acid sequence that comprises at least one amino acid substitution when compared to the amino acid sequence of the unmodified R protein. The coding sequence can be altered, for example, by making a targeted change in one or more nucleotides in the coding sequence or by random mutagenesis. In one embodiment of the invention, the R protein is potato R3a protein and the plant pathogen is Phytophthora infestans.

[0014] The present invention additionally provides methods for making a modified R protein that is capable of causing in a plant a hypersensitive response of increased severity. The methods comprise substituting at least one amino acid in the amino sequence of an R protein with a different amino acid so as to produce a modified R protein. The modified R protein is capable of causing a hypersensitive response in a plant in the presence of an effector protein, wherein the hypersensitive response is of increased severity, when compared to a hypersensitive response caused in a plant by the unmodified R protein in the presence of the effector protein. Typically, the methods involve altering the coding sequence of the R protein, whereby the altered coding sequence encodes an amino acid sequence that comprises at least one amino acid substitution when compared to the amino acid sequence of the unmodified R protein. The coding sequence can be altered, for example, by making a targeted change in one or more nucleotides in the coding sequence or by random mutagenesis.

[0015] Additionally provided are plants, plant parts, seeds, plant cells, other non-human host cells, and expression cassettes comprising one or more of the nucleic acid molecules of the present invention and the R proteins or polypeptides encoded by the coding sequences of the present invention.

[0016] The present invention further provides isolated polypeptides comprising AVR3a homologs from Phytophthora palmivora, nucleic acid molecules encoding such AVR3a homologs, and methods of using such polypeptides and nucleic acid molecules. Additionally provided are expression cassettes, bacterial cells, plant cells, and other non-human host cells, plants, plant parts, and seeds, comprising nucleic acid molecules encoding the AVR3a homologs of the present invention.

### BRIEF DESCRIPTION OF THE DRAWINGS

[0017] FIG. 1. Artificial evolution to extend R3a recognition specificity: experimental design.

[0018] FIG. 2. Co-expression of R3a wild-type and mutant clones with pGR106-AVR3aEM, pGR106-ΔGFP and pGR106-AVR3aKI. 10-12 spots from different plants were coinfiltrated with the mentioned cultures and HR-like phenotypes were scored during 7 d.p.i. The scores plotted represent the mean values at 7 d.p.i. of all the infiltrated spots. HR index is measured in arbitrary units according the characteristics observed: from no visible HR phenotype to confluent necrosis.

[0019] FIG. 3. Right Panel: Sequence analysis of selected mutant clones. Left Panel: Details of the mutations for each clone. Mutations is indicated as follows: XnumberY, with X being the original amino acid in R3a at amino acid position (number), and with Y being the amino acid present in the mutant R3a clone.

[0020] FIG. 4. Dissection of the contribution of the different mutated sites on R3a to the enhanced recognition of AVR3a^{EM} effector allele. FIG. 4A: chimerical clones between wild-type R3a and clone 1B/A10 were made to separate mutations affecting the CC and NBS domains from that affecting the leucine-rich repeat (LRR) domain. The chimerical clones were transformed into Agrobacterium tumefaciens and used for infiltration assays. FIGS. 4B and 4C show the co-infiltration assays scheme. The denoted closes in FIG. 4B were co-infiltrated with pGR106-AVR3a^{EM}, pGR106-ΔGFP, or pGR106-AVR3a^{KI} as indicated in FIG. 4C. The HR-like responses were analyzed at 4 d.p.i. under white or UV light. Representative leaves of three replicates are shown in FIG. 4C.

[0021] FIG. 5. Co-expression of mutated R3a clones that encode modified R3a proteins with a single amino acid substitution with Phytophthora infestans AVR3a (PiAVR3a). The clones were co-infiltrated with PiAVR3a and different variants of PiAVR3a (pGR106 background) into N. benthamiana leaves. The single amino acid substitution clones recognize not only AVR3a^{EM} but also other variants of AVR3a. The phenotypes (HR) were analyzed under UV light 4 d.p.i. All the GS, the 17+ and Ch7 R3a versions were cloned in the pCBNptII_PTvnt1.1 backbone.

[0022] FIG. 6. Co-expression of mutated R3a clones with homologs of PiAVR3a. The modified R3a proteins encoded by the mutated R3a clones recognize not only AVR3a^{EM} from Phytophthora infestans (Pi) but also members of the AVR3a family from other Phytophthora species. Mutated R3a clones (all cloned in the pCB302-3 backbone) were co-infiltrated with different members of the AVR3a family from P. sojae (Ps) and P. capsici (Pc) (pTRBO background) in N. benthamiana. PiAVR2 is an unrelated effector, included as a negative control. The phenotypes (HR) were analyzed under UV light 4 d.p.i.

[0023] FIG. 7. Co-expression of mutated R3a clones that encode modified R3a proteins with a single amino acid substitution with homologs of PiAVR3. The modified R3a proteins encoded by the mutated R3a clones recognize not only AVR3a^{EM} from Phytophthora infestans (Pi) but also members of the AVR3a family from other Phytophthora species. Mutated R3a clones (all cloned in the pCBNptII_PTvnt1.1 backbone) were co-infiltrated with different members of the AVR3a family from P. sojae (Ps) and P. capsici (Pc) (pTRBO background) in N. benthamiana. Phenotype (HR) was analyzed under UV light 4 d.p.i.

[0024] FIG. 8. The modified R3a encoded by the GS4 clone is more sensitive for PiAVR3a^{KI} recognition than is R3a. Several R3a modified clones (GS4, 8, 12 and 15; 6C/C10 and Ch7) or the R3a (wild-type) clone were co-infiltrated side-by-side with serial dilutions of PiAVR3a^{KI} (pK7 backbone) in N. benthamiana as described in Example 3. Phenotype (HR) was scored in one of three categories at 4 d.p.i. for neighboring spots one the same leaf (i.e., modified R3a and R3a in opposite sides of the leaf) as follows: (1) modified R3a stronger than R3a, (2) modified R3a equal to R3a, or (3) modified R3a weaker than R3a. FIG. 8A is a graphical representation of the results for each of the clones expressing a modified R3a protein and empty vector (EV) control. “R3a+” is a modified R3a and “R3a” is wild-type R3a. FIG. 8B is a photograph of a representative N. benthamiana leaf in which the R3a clone was co-infiltrated with a clone expressing PiAVR3a^{KI} on the left side of the leaf and the modified R3a clone (GS4) was co-infiltrated with a clone expressing PiAVR3a^{KI} on the left side of the leaf.

[0025] FIG. 9 is a graphical representation of the hypersensitive response in N. benthamiana in the presence of PiAVR3a^{EM} when the modified R3a protein encoded by the GS4 clone is co-infiltrated with a clone encoding R3a (wild-type). HR index is measured in arbitrary units according the characteristics observed: from no visible HR phenotype to confluent necrosis. The HR index was determined at 2.5, 3.5, 4.5, and 5.5 d.p.i. The four lines in the figure from top to bottom represent results from the co-infiltration of clones expressing: (1) R3a, e.v. (empty vector control), and PiAVR3a^{KI}; (2) GS4, e.v., and PiAVR3a^{EM}; (3) R3a, GS4, and PiAVR3a^{EM}; and (4) R3a, e.v., and PiAVR3a^{EM}.

[0026] FIG. 10 is a graphical representation of the hypersensitive response in N. benthamiana in the presence of PiAVR3a^{EM} when the modified R3a protein encoded by the GS12 clone is co-infiltrated with a clone encoding R3a (wild-type). HR index is measured in arbitrary units according the characteristics observed: from no visible HR phenotype to confluent necrosis. The HR index was determined at 2.5, 3.5, 4.5, and 5.5 d.p.i. The four lines in the figure from top to bottom represent results from the co-infiltration of clones expressing: (1) R3a, e.v. (empty vector control), and PiAVR3a^{KI}; (2) GS12, e.v., and PiAVR3a^{EM}; (3) R3a, GS12, and PiAVR3a^{EM}; and (4) R3a, e.v., and PiAVR3a^{EM}.

[0027] FIG. 11. Infection of R3a transgenic or Wild-type N. benthamiana with a RFP fluorescent P. palmivora 6390 at 3 d.p.i.

[0028] FIG. 12. R3a can trigger cell death in non-solanaceous unrelated species. Co-expression of R3a and Avr3a from P. infestans in lamb's lettuce and spinach and visualization of HR/cell death using UV illumination.

### SEQUENCE LISTING

[0029] The nucleotide and amino acid sequences listed in the accompanying sequence listing are shown using standard letter abbreviations for nucleotide bases, and three-letter code for amino acids. The nucleotide sequences follow the standard convention of beginning at the 5′ end of the sequence and proceeding forward (i.e., from left to right in each line) to the 3′ end. Only one strand of each nucleotide sequence is shown, but the complementary strand is understood to be included by any reference to the displayed strand. The amino acid sequences follow the standard convention of beginning at the amino terminus of the sequence and proceeding forward (i.e., from left to right in each line) to the carboxy terminus.

[0030] SEQ ID NO: 1 sets forth a nucleotide sequence encoding the wild-type R3a protein.

[0031] SEQ ID NO: 2 sets forth the amino acid sequence of the wild-type R3a protein.

[0032] SEQ ID NO: 3 sets forth a nucleotide sequence encoding the modified R3a protein corresponding to clone 1A/1A (also referred to herein as 1+).

[0033] SEQ ID NO: 4 sets forth the amino acid sequence of the modified R3a protein corresponding to clone 1A/1A.

[0034] SEQ ID NO: 5 sets forth a nucleotide sequence encoding the modified R3a protein corresponding to clone 1B/A10 (also referred to herein as 2+).

[0035] SEQ ID NO: 6 sets forth the amino acid sequence of the modified R3a protein corresponding to clone 1B/A10.

[0036] SEQ ID NO: 7 sets forth a nucleotide sequence encoding the modified R3a protein corresponding to clone 1B/F10 (also referred to herein as 3+).

[0037] SEQ ID NO: 8 sets forth the amino acid sequence of the modified R3a protein corresponding to clone 1B/F10.

[0038] SEQ ID NO: 9 sets forth a nucleotide sequence encoding the modified R3a protein corresponding to clone 1B/H5 (also referred to as 4+).

[0039] SEQ ID NO: 10 sets forth the amino acid sequence of the modified R3a protein corresponding to clone 1B/H5.

[0040] SEQ ID NO: 11 sets forth a nucleotide sequence encoding the modified R3a protein corresponding to clone 2A/B5 (also referred to herein as 5+).

[0041] SEQ ID NO: 12 sets forth the amino acid sequence of the modified R3a protein corresponding to clone 2A/B5.

[0042] SEQ ID NO: 13 sets forth a nucleotide sequence encoding the modified R3a protein corresponding to clone 2A/F11 (also referred to herein as 7+).

[0043] SEQ ID NO: 14 sets forth the amino acid sequence of the modified R3a protein corresponding to clone 2A/F11.

[0044] SEQ ID NO: 15 sets forth a nucleotide sequence encoding the modified R3a protein corresponding to clone 3A/A10 (also referred to herein as 8+).

[0045] SEQ ID NO: 16 sets forth the amino acid sequence of the modified R3a protein corresponding to clone 3A/A10.

[0046] SEQ ID NO: 17 sets forth a nucleotide sequence encoding the modified R3a protein corresponding to clone 3B/B4 (also referred to herein as 9+).

[0047] SEQ ID NO: 18 sets forth the amino acid sequence of the modified R3a protein corresponding to clone 3B/B4.

[0048] SEQ ID NO: 19 sets forth a nucleotide sequence encoding the modified R3a protein corresponding to clone 3B/H1 (also referred to herein as 10+).

[0049] SEQ ID NO: 20 sets forth the amino acid sequence of the modified R3a protein corresponding to clone 3B/H1.

[0050] SEQ ID NO: 21 sets forth a nucleotide sequence encoding the modified R3a protein corresponding to clone 3D/D3 (also referred to herein as 10+).

[0051] SEQ ID NO: 22 sets forth the amino acid sequence of the modified R3a protein corresponding to clone 3D/D3.

[0052] SEQ ID NO: 23 sets forth a nucleotide sequence encoding the modified R3a protein corresponding to clone 4B/E10 (also referred to herein as 12+).

[0053] SEQ ID NO: 24 sets forth the amino acid sequence of the modified R3a protein corresponding to clone 4B/E10.

[0054] SEQ ID NO: 25 sets forth a nucleotide sequence encoding the modified R3a protein corresponding to clone 4D/B3 (also referred to herein as 14+).

[0055] SEQ ID NO: 26 sets forth the amino acid sequence of the modified R3a protein corresponding to clone 4D/B3.

[0056] SEQ ID NO: 27 sets forth a nucleotide sequence encoding the modified R3a protein corresponding to clone 4D/D10 (also referred to herein as 15+).

[0057] SEQ ID NO: 28 sets forth the amino acid sequence of the modified R3a protein corresponding to clone 4D/D10.

[0058] SEQ ID NO: 29 sets forth a nucleotide sequence encoding the modified R3a protein corresponding to clone 6A/E5 (also referred to herein as 16+).

[0059] SEQ ID NO: 30 sets forth the amino acid sequence of the modified R3a protein corresponding to clone 6A/E5.

[0060] SEQ ID NO: 31 sets forth a nucleotide sequence encoding the modified R3a protein corresponding to clone 6C/C10 (also referred to herein as 17+).

[0061] SEQ ID NO: 32 sets forth the amino acid sequence of the modified R3a protein corresponding to clone 6C/C10.

[0062] SEQ ID NO: 33 sets forth a nucleotide sequence encoding the modified R3a protein corresponding to clone 6D/A1 (also referred to herein as 18+).

[0063] SEQ ID NO: 34 sets forth the amino acid sequence of the modified R3a protein corresponding to clone 6D/A1.

[0064] SEQ ID NO: 35 sets forth a nucleotide sequence encoding the modified R3a protein corresponding to clone 6D/E6 (also referred to herein as 19+).

[0065] SEQ ID NO: 36 sets forth the amino acid sequence of the modified R3a protein corresponding to clone 6D/E6.

[0066] SEQ ID NO: 37 sets forth a nucleotide sequence of BAC clone SH23G23.

[0067] SEQ ID NO: 38 sets forth the nucleotide sequence of primer R3a_BamHI_Fw_MES.

[0068] SEQ ID NO: 39 sets forth the nucleotide sequence of primer R3a_SpeI_Rev_MES.

[0069] SEQ ID NO: 40 sets forth the nucleotide sequence of the Rpi-vnt1.1 promoter.

[0070] SEQ ID NO: 41 sets forth the nucleotide sequence of the Rpi-vnt1.1 terminator.

[0071] SEQ ID NO: 42 sets forth a nucleotide sequence encoding the modified R3a protein corresponding to clone GS4.

[0072] SEQ ID NO: 43 sets forth the amino acid sequence of the modified R3a protein corresponding to clone GS4.

[0073] SEQ ID NO: 44 sets forth a nucleotide sequence encoding the modified R3a protein corresponding to clone GS8.

[0074] SEQ ID NO: 45 sets forth the amino acid sequence of the modified R3a protein corresponding to clone GS8.

[0075] SEQ ID NO: 46 sets forth a nucleotide sequence encoding the modified R3a protein corresponding to clone GS9.

[0076] SEQ ID NO: 47 sets forth the amino acid sequence of the modified R3a protein corresponding to clone GS9.

[0077] SEQ ID NO: 48 sets forth a nucleotide sequence encoding the modified R3a protein corresponding to clone GS12.

[0078] SEQ ID NO: 49 sets forth the amino acid sequence of the modified R3a protein corresponding to clone GS12.

[0079] SEQ ID NO: 50 sets forth a nucleotide sequence encoding the modified R3a protein corresponding to clone GS15.

[0080] SEQ ID NO: 51 sets forth the amino acid sequence of the modified R3a protein corresponding to clone GS15.

[0081] SEQ ID NO: 52 sets forth a nucleotide sequence encoding the modified R3a protein corresponding to clone CT* (also referred to has Ch7 or 2+Ch7).

[0082] SEQ ID NO: 53 sets forth the amino acid sequence of the modified R3a protein corresponding to clone CT*.

[0083] SEQ ID NO: 54 sets forth the amino acid sequence of an AVR3a homolog from Phytophthora palmivora designated as AJ1A.

[0084] SEQ ID NO: 55 sets forth the amino acid sequence of an AVR3a homolog from Phytophthora palmivora designated as AJ1B.

[0085] SEQ ID NO: 56 sets forth the amino acid sequence of an AVR3a homolog from Phytophthora palmivora designated as AJ2A.

[0086] SEQ ID NO: 57 sets forth the amino acid sequence of an AVR3a homolog from Phytophthora palmivora designated as AJ3A.

[0087] SEQ ID NO: 58 sets forth the amino acid sequence of an AVR3a homolog from Phytophthora palmivora designated as AJ4A.

[0088] SEQ ID NO: 59 sets forth the amino acid sequence of an AVR3a homolog from Phytophthora palmivora designated as AJ5A.

[0089] SEQ ID NO: 60 sets forth the amino acid sequence of an AVR3a homolog from Phytophthora palmivora designated as L1B.

[0090] SEQ ID NO: 61 sets forth the amino acid sequence of an AVR3a homolog from Phytophthora palmivora designated as L2A.

[0091] SEQ ID NO: 62 sets forth the amino acid sequence of an AVR3a homolog from Phytophthora palmivora designated as L3A.

[0092] SEQ ID NO: 63 sets forth the amino acid sequence of an AVR3a homolog from Phytophthora palmivora designated as L3B.

[0093] SEQ ID NO: 64 sets forth the amino acid sequence of an AVR3a homolog from Phytophthora palmivora designated as L4A.

[0094] SEQ ID NO: 65 sets forth the amino acid sequence of an AVR3a homolog from Phytophthora palmivora designated as LSA.

[0095] SEQ ID NO: 66 sets forth the amino acid sequence of an AVR3a homolog from Phytophthora palmivora designated as L6A.

[0096] SEQ ID NO: 67 sets forth the amino acid sequence of an AVR3a homolog from Phytophthora palmivora designated as L6B.

[0097] SEQ ID NO: 68 sets forth the amino acid sequence of an AVR3a homolog from Phytophthora palmivora designated as L7A.

[0098] SEQ ID NO: 69 sets forth the amino acid sequence of an AVR3a homolog from Phytophthora palmivora designated as NODE_{—}55578.

[0099] SEQ ID NO: 70 sets forth the amino acid sequence of an AVR3a homolog from Phytophthora palmivora designated as NODE_{—}238692.

[0100] SEQ ID NO: 71 sets forth the amino acid sequence of an AVR3a homolog from Phytophthora palmivora designated as NODE_{—}248107.

[0101] SEQ ID NO: 72 sets forth the amino acid sequence of an AVR3a homolog from Phytophthora palmivora designated as NODE_{—}279538.

[0102] SEQ ID NO: 73 sets forth the amino acid sequence of an AVR3a homolog from Phytophthora palmivora designated as NODE_{—}156862.

[0103] SEQ ID NO: 74 sets forth the amino acid sequence of an AVR3a homolog from Phytophthora palmivora designated as AJ2B.

[0104] SEQ ID NO: 75 sets forth the amino acid sequence of an AVR3a homolog from Phytophthora palmivora designated as AJ3B.

[0105] SEQ ID NO: 76 sets forth the amino acid sequence of an AVR3a homolog from Phytophthora palmivora designated as AJ6B.

[0106] SEQ ID NO: 77 sets forth the amino acid sequence of an AVR3a homolog from Phytophthora palmivora designated as AJ7A.

[0107] SEQ ID NO: 78 sets forth the amino acid sequence of an AVR3a homolog from Phytophthora palmivora designated as AJ8A.

[0108] SEQ ID NO: 79 sets forth the amino acid sequence of an AVR3a homolog from Phytophthora palmivora designated as L1A.

[0109] SEQ ID NO: 80 sets forth the amino acid sequence of an AVR3a homolog from Phytophthora palmivora designated as L3C.

[0110] SEQ ID NO: 81 sets forth the amino acid sequence of an AVR3a homolog from Phytophthora palmivora designated as L4C.

[0111] SEQ ID NO: 82 sets forth the amino acid sequence of an AVR3a homolog from Phytophthora palmivora designated as L6C.

[0112] SEQ ID NO: 83 sets forth the amino acid sequence of an AVR3a homolog from Phytophthora palmivora designated as L7B.

[0113] SEQ ID NO: 84 sets forth the amino acid sequence of an AVR3a homolog from Phytophthora palmivora designated as L7C.

### DETAILED DESCRIPTION OF THE INVENTION

[0114] In the context of this disclosure, a number of terms and abbreviations are used. The following definitions are provided.

[0115] “R protein” and “R gene product” are equivalent terms that can be used interchangeably herein and that refer to the gene product of a plant resistance gene referred to an “R gene”. For the present invention, such an R protein or R gene product is a protein that, when expressed in a plant, particularly at the site of infection of a pathogen, is capable of initiating a hypersensitive response (HR) which is characterized by a programmed cell death response in the immediate vicinity of the pathogen. The methods of the present invention do not depend on the use of particular coding sequence for an R protein or R gene product. Any coding sequence of any R gene product can be employed in methods disclosed herein, including, for example, the coding sequences of the R3a protein and of the modified R3a proteins of the invention.

[0116] “Modified R protein”, “modified R gene product”, “mutant R protein”, and “mutant R gene product” are equivalent terms that can be used interchangeably herein and that refer to an R protein or R gene product has at least one amino acid substitution when compared to another R protein. Preferably, the modified R proteins of the present invention comprise an amino acid sequence comprising at least one amino acid substitution when compared to an R protein prior to being modified or altered by the methods disclosed herein or any other methods known in the art for modifying the amino acid sequence of a protein. In certain embodiments of the invention, the R protein that is modified or altered by the methods disclosed herein is a native R protein found in a plant including both wild-type R proteins, naturally occurring, mutant R proteins, and other allelic forms. In other embodiments of the invention, the R protein that is modified or altered by the methods disclosed herein was previously modified by methods of the present invention or by any other method known in the art.

[0117] “Modified R gene”, “modified R polynucleotide”, “mutant R gene”, and “mutant R polynucleotide” are equivalent terms that can be used interchangeably herein and that refer to gene or polynucleotide that encodes a modified R protein of the invention or fragment thereof.

[0118] By “heterologous polynucleotide” is intended a polynucleotide that is not native or endogenous to the genome of a plant, other organism, or host cell. Such heterologous polynucleotides include, for example, any nucleic acid molecules or polynucleotides that are introduced into the genome of a plant as disclosed herein and further include native or endogenous genes that are modified in vivo or in planta as disclosed hereinbelow by methods known in the art such as, for example, targeted mutagenesis, homologous recombination, and mutation breeding.

[0119] The present invention is based on the discovery that a plant resistance (R) protein that is specific to an oomcyte plant pathogen can be modified to alter the recognition specificity of the R protein. As is described in detail hereinebelow, a random mutagenesis approach was employed to make modified versions of the potato R3a protein, a resistance protein that is encoded by the R3a gene. The R3a gene is known to confer upon a plant resistance to strains of the oomycte pathogen, Phytophthora infestans, that produce the AVR3a^{KI} effector protein. The resistance mechanism involves a hypersensitive response in the host plant comprising the R3a protein. The hypersensitive response is initiated by recognition of the P. infestans avirulence effector AVR3a^{KI} by the R3a protein in the host plant. However, in pathogen populations of P. infestans, the effector AVR3a^{EM} predominates, and the R3a protein does not recognize AVR3a^{EM} and initiate a hypersensitive response in a plant. Therefore, the R3a resistance gene does not provide resistance against P. infestans strains that produce AVR3a^{EM} but do not produce AVR3a^{KI}. The discovery that led to the present invention is that modified R3a proteins comprising one or more amino acid substitutions relative the wild-type R3a amino sequence can initiate in a plant a hypersensitive response in the presence of AVR3a^{EM}. Moreover, these modified R3a proteins retain the function of initiating in a plant a hypersensitive response in the presence of AVR3a^{KI}. Accordingly, the present invention finds use in enhancing the resistance of crop plants to plant pathogens.

[0120] The present invention provides nucleic acid molecules for R genes that are modified versions of the R3a resistance gene of potato (Solanum tuberosum L.). The R genes of the present invention encode modified R3a resistance proteins, which display altered specificity for effector proteins from Phytophthora infestans and which are capable of causing a hypersensitive response in a plant when expressed in a plant in the presence of a Phytophthora infestans strain that produces the AVR3a^{EM} effector protein. Thus, in one embodiment, the present invention provides nucleic acid molecules comprising a nucleotide sequence encoding a modified R3a protein that is capable of inducing a hypersensitive response in a plant in the presence of AVR3a^{EM}. Preferably, the modified R3a proteins encoded by such nucleic acid molecules also retain the function of the wild-type R3a protein of inducing a hypersensitive response in a plant in the presence of AVR3a^{KI}. Such nucleic acid molecules find use in enhancing the resistance of plants to plant pathogens by, for example, the methods of the present invention described hereinbelow.

[0121] In addition to recognizing AVR3a^{EM} from P. infestans, modified R3a proteins of the present invention have also been found to recognize AVR3a homologs from other Phytophthora species (FIGS. 6-7) including, but not limited to, P. sojae, P. capsici, and P. palmivora. Accordingly, the methods and compositions disclosed herein not only find use in enhancing the resistance of potato and tomato to P. infestans, but also find use in enhancing the resistance of other plant species, particularly monocot and dicot crop plant species, to one or more Phytophthora species such as, for example, P. infestans, P. sojae, P. capsici, and P. palmivora.

[0122] In addition to potato and tomato, plants of interest for the present invention include, but are not limited to, pepper (Capsicum spp.), soybean, palms, eggplant (Solanum melongena), petunia (Petunia×hybrida), Physalis sp., woody nightshade (Solanum dulcamara), garden huckleberry (Solanum scabrum), gboma eggplant (Solanum macrocarpon), the asteraceous weeds, Ageratum conyzoides and Solanecio biafrae, and cocoa (Theobroma cacao).

[0123] In one aspect, the present invention provides nucleic acid molecules comprising nucleotide sequences encoding modified R proteins, particularly modified R3a proteins. Such nucleic acid molecules find use in methods for expressing the R3a protein in a plant, plant part, plant cell, or other non-human host cell. Non-human host cells of the present invention include, but are not limited to, plant cells, animal cells, bacterial cells, oomycte cells, and fungal cells.

[0124] Nucleic acid molecules that comprise nucleotide sequences encoding modified R3a proteins of the present invention include, but are not limited to, nucleic acid molecules comprising: a nucleotide sequences set forth in SEQ ID NO: 3, 5, 7, 9, 11, 13, 15, 17, 19, 21, 23, 25, 27, 29, 31, 33, 35, 42, 44, 46, 48, 50, or 5; or a nucleotide sequence encoding an amino acid sequence set forth in SEQ ID NO: 4, 6, 8, 10, 12, 14, 16, 18, 20, 22, 24, 26, 28, 30, 32, 34, 36, 43, 45, 47, 49, 51, or 53. The nucleotide sequence of the wild-type (i.e., not modified) potato R3a gene is set forth in SEQ ID NO: 1 and the amino acid sequence of the wild-type R3a protein encoded thereby is set forth in SEQ ID NO: 2.

[0125] Modified R3a proteins of the present invention include, but are not limited to, polypeptides comprising: an amino acid sequence set forth in SEQ ID NO: 4, 6, 8, 10, 12, 14, 16, 18, 20, 22, 24, 26, 28, 30, 32, 34, 36, 43, 45, 47, 49, 51, or 53; or an amino acid sequence encoded by a nucleotide sequence set forth in SEQ ID NO: 3, 5, 7, 9, 11, 13, 15, 17, 19, 21, 23, 25, 27, 29, 31, 33, 35, 42, 44, 46, 48, 50, or 52.

[0126] In one embodiment, the present invention provides nucleic acid molecules encoding modified R3a proteins that comprise an amino acid sequence that differs from the wild-type R3a amino acid sequence by a single amino acid substitution and the modified R3a proteins encoded thereby. Preferably, the single amino acid substitution is in the LRR domain of the R3a protein. More preferably, the single amino acid substitution is selected from the group consisting of L668P, K920E, E941K, C950R, E983K, and K1250R. Nucleic acid molecules encoding such modified R3a proteins nucleic acid molecules include, but are not limited to, nucleic acid molecules comprising: a nucleotide sequence set forth in SEQ ID NO: 31, 42, 44, 48, 50, or 52; or a nucleotide sequence encoding an amino acid sequence set forth in SEQ ID NO: 32, 43, 45, 49, 51, or 53. Such modified R3a proteins include, but are not limited to, polypeptides or proteins comprising: an amino acid sequence set forth in SEQ ID NO: 32, 43, 45, 49, 51, or 53; or an amino acid sequence encoded by a nucleotide sequence set forth in SEQ ID NO: 31, 42, 44, 48, 50 or 52.

[0127] For expression of a modified R protein of the present invention in a plant or plant cell, the methods of the invention involve transforming a plant or plant cell with a polynucleotide of the present invention that encodes the modified R protein. Such a nucleotide molecule can be operably linked to a promoter that drives expression in a plant cell. Any promoter known in the art can be used in the methods of the invention including, but not limited to, constitutive promoters, pathogen-inducible promoters, wound-inducible promoters, tissue-preferred promoters, and chemical-regulated promoters. The choice of promoter will depend on the desired timing and location of expression in the transformed plant or other factors. In one embodiment of the invention, the R3a promoter is employed to increase the expression of a modified R3a protein in a plant.

[0128] The invention further provides methods for enhancing the resistance of a plant to a plant pathogen, particularly an oomycete plant pathogen, more particularly Phytophthora infestans. The methods comprise transforming a plant cell with a polynucleotide comprising a nucleotide sequence encoding a modified R protein, wherein the modified R protein is capable of inducing a hypersensitive response in a plant in the presence of an effector protein produced by the plant pathogen. Prior to being modified by the methods disclosed herein, the R protein was not capable of initiating in a plant a hypersensitive response in the presence of the effector protein. The methods of the invention can further comprise regenerating the transformed plant cell into a transformed plant.

[0129] In one embodiment, the invention provides methods for enhancing the resistance of a plant, particularly a potato or tomato plant, to Phytophthora infestans. The methods comprise transforming a plant cell with a polynucleotide comprising a nucleotide sequence encoding a modified R3a protein of the invention, wherein the modified R3a protein is capable of inducing a hypersensitive response in a plant in the presence of AVR3a^{EM} and preferably is also capable of inducing a hypersensitive response in a plant in the presence of AVR3a^{KI}. Nucleotide sequences encoding modified R3a proteins of the invention that can be used in the methods disclosed herein include, but are not limited to, the nucleotide sequences set forth in SEQ ID NOS: 3, 5, 7, 9, 11, 13, 15, 17, 19, 21, 23, 25, 27, 29, 31, 33, 35, 42, 44, 46, 48, 50, and 52 and fragments and variants thereof that encode modified R3a proteins that that are able to initiate in a plant a hypersensitive response in the presence of at least one effector protein that also is recognized by the full-length, modified R3a protein from which the fragment or variant was derived. If desired, the methods can further involve regenerating a transformed plant from the transformed plant cell. Such transformed plants comprise enhanced resistance to at least one strain of Phytophthora infestans, particularly a strain of Phytophthora infestans that produces AVR3a^{EM}.

[0130] In another embodiment, the methods for enhancing the resistance of a plant to Phytophthora infestans involve enhancing the resistance of a potato plant to Phytophthora infestans. Such methods comprise altering the coding sequence of the R3a gene in a plant or plant cell, whereby the altered coding sequence encodes a modified R3a protein of the invention that comprises an amino acid sequence having at least one amino acid substitution relative to the amino acid sequence of the R3a protein encoded by the R3a gene, wherein the modified R3a protein is capable of inducing a hypersensitive response in a plant in the presence of AVR3a^{EM}. Preferably, the modified R3a protein is also capable of inducing a hypersensitive response in a plant in the presence of AVR3a^{KI}. The coding sequence can, for example, be altered in vivo or in planta by targeted mutagenesis, homologous recombination, or mutation breeding. The methods can further involve regenerating a transformed plant from the transformed cell, wherein the transformed plant comprises enhanced resistance to at least one strain of Phytophthora infestans.

[0131] Any methods known in the art for modifying DNA in the genome of a plant can used to alter the coding sequences of the R3a gene in planta. Such methods include, for example, methods involving targeted mutagenesis, homologous recombination, and mutation breeding. Targeted mutagenesis or similar techniques are disclosed in U.S. Pat. Nos. 5,565,350; 5,731,181; 5,756,325; 5,760,012; 5,795,972 and 5,871,984; all of which are herein incorporated in their entirety by reference. Methods for gene modification or gene replacement involving homologous recombination can involve inducing double breaks in DNA using zinc-finger nucleases or homing endonucleases that have been engineered endonucleases to make double-strand breaks at specific recognition sequences in the genome of a plant, other organism, or host cell. See, for example, Durai et al., (2005) Nucleic Acids Res 33:5978-90; Mani et al. (2005) Biochem Biophys Res Comm 335:447-57; U.S. Pat. Nos. 7,163,824, 7,001,768, and 6,453,242; Arnould et al. (2006) J Mol Biol 355:443-58; Ashworth et al., (2006) Nature 441:656-9; Doyon et al. (2006) J Am Chem Soc 128:2477-84; Rosen et al., (2006) Nucleic Acids Res 34:4791-800; and Smith et al., (2006) Nucleic Acids Res 34:e149; U.S. Pat. App. Pub. No. 2009/0133152; and U.S. Pat. App. Pub. No. 2007/0117128; all of which are herein incorporated in their entirety by reference.

[0132] TAL effector nucleases can also be used to make double-strand breaks at specific recognition sequences in the genome of a plant for gene modification or gene replacement through homologous recombination. TAL effector nucleases are a new class of sequence-specific nucleases that can be used to make double-strand breaks at specific target sequences in the genome of a plant or other organism. TAL effector nucleases are created by fusing a native or engineered transcription activator-like (TAL) effector, or functional part thereof, to the catalytic domain of an endonuclease, such as, for example, FokI. The unique, modular TAL effector DNA binding domain allows for the design of proteins with potentially any given DNA recognition specificity. Thus, the DNA binding domains of the TAL effector nucleases can be engineered to recognize specific DNA target sites and thus, used to make double-strand breaks at desired target sequences. See, WO 2010/079430; Morbitzer et al. (2010) PNAS 10.1073/pnas.1013133107; Scholze & Boch (2010) Virulence 1:428-432; Christian et al. Genetics (2010) 186:757-761; Li et al. (2010) Nuc. Acids Res. (2010) doi:10.1093/nar/gkq704; and Miller et al. (2011) Nature Biotechnology 29:143-148; all of which are herein incorporated by reference.

[0133] Mutation breeding methods can involve, for example, exposing the plants or seeds to a mutagen, particularly a chemical mutagen such as, for example, ethyl methanesulfonate (EMS) and selecting for plants that possess a desired modification in the R3a gene. However, other mutagens can be used in the methods disclosed herein including, but not limited to, radiation, such as X-rays, Gamma rays (e.g., cobalt 60 or cesium 137), neutrons, (e.g., product of nuclear fission by uranium 235 in an atomic reactor), Beta radiation (e.g., emitted from radioisotopes such as phosphorus 32 or carbon 14), and ultraviolet radiation (preferably from 2500 to 2900 nm), and chemical mutagens such as base analogues (e.g., 5-bromo-uracil), related compounds (e.g., 8-ethoxy caffeine), antibiotics (e.g., streptonigrin), alkylating agents (e.g., sulfur mustards, nitrogen mustards, epoxides, ethylenamines, sulfates, sulfonates, sulfones, lactones), azide, hydroxylamine, nitrous acid, or acridines. Further details of mutation breeding can be found in “Principals of Cultivar Development” Fehr, 1993 Macmillan Publishing Company the disclosure of which is incorporated herein by reference.

[0134] The present invention further provides methods for making R proteins with altered recognition specificity for an effector protein of a plant pathogen. The proteins produced by these methods find use in enhancing the resistance of plants to plant pathogens by, for example, the methods disclosed herein. The methods comprise substituting at least one amino acid in the amino sequence of an R protein with a different amino acid, so as to produce a modified R protein. Preferably, the R protein is an R protein that initiates in a plant a hypersensitive response in the presence of an effector protein from an oomycte plant pathogen. More preferably, the R protein is an R protein from potato or tomato that initiates in a plant a hypersensitive response in the presence of an effector protein from the oomycete plant pathogen, Pythophthora infestans. Most preferably, the R protein is the R3a protein.

[0135] Prior to being altered by the methods of the invention, the R protein is capable of causing a hypersensitive response when the unmodified R protein is present in a plant with a first effector protein from a plant pathogen but is not capable of causing a hypersensitive response when the unmodified R protein is present in a plant with a second effector protein from the plant pathogen. Generally, the first and second effector proteins are from the same species of plant pathogen but may be from different strains or genotypes of the plant pathogen, wherein the first effector protein is from a first strain or genotype of the plant pathogen and the second effector protein is from a second strain or genotype of the plant pathogen.

[0136] The modified R protein is capable of causing a hypersensitive response when the modified R protein is present in a plant with the second effector protein and preferably is also capable of hypersensitive response when the modified R protein is present in a plant with the first effector protein. In one embodiment of the invention, the modified R protein is the R protein is a modified potato R3a protein, the first effector is AVR3a^{KI} of Phytophthora infestans, and the second effector is AVR3a^{EM} of Phytophthora infestans.

[0137] The methods for making R proteins with altered recognition specificity comprise altering the coding sequence of the R protein, whereby the altered coding sequence encodes an amino acid sequence that comprises at least one amino acid substitution when compared to the amino acid sequence of the unmodified R protein. The coding sequence can be altered, for example, by making a targeted change in one or more nucleotides in the coding sequence (i.e., site directed mutagenesis) or by random mutagenesis. If desired, the altered coding sequences can then used in assays for determining if the protein encoded thereby initiates in a plant a hypersensitive response in the presence of the second effector. Similarly, the altered coding sequences can then used in assays for determining if the protein encoded thereby initiates in a plant a hypersensitive response in the presence of the second effector. The present invention does not depend on particular methods of determining whether the proteins encoded by the altered coding sequences are capable of initiating in a plant a hypersensitive response in the presence of either the first or second effectors.

[0138] An example of a preferred method for determining if the protein encoded by an altered coding sequence initiates in a plant a hypersensitive response in the presence of an effector is set forth below in Example 1. This method involves expressing a protein encoded by an altered coding sequence of the invention in a first Agrobacterium tumefaciens culture, expressing an effector protein in a second A. tumefaciens culture, co-infiltrating cells from each of the A. tumefaciens cultures into Nicotiana benthamiana leaves, and then monitoring the leaves after the co-infiltration to determine if hypersensitive response occurred (see, Van der Hoorn et al. (2000) Mol. Plant-Microbe Interact. 13:439-446; Bos et al. (2006) Plant J. 48:165-176; Bos et al. (2009) Mol. Plant-Microbe Interact. 22: 269-281). If desired, the severity of the hypersensitive response can also be evaluated as described in Example 1 below.

[0139] In another embodiment, the present invention provides methods for making a modified R protein that is capable of causing in a plant a hypersensitive response of increased severity in the presence of an effector protein of a plant pathogen. The methods comprise altering the coding sequence of the R protein, whereby the altered coding sequence encodes an amino acid sequence that comprises at least one amino acid substitution when compared to the amino acid sequence of the unmodified R protein essentially as described above for the methods for making R proteins with altered recognition specificity. However, in the instant embodiment, the modified R protein is capable of causing a hypersensitive response in a plant in the presence of an effector protein that is of increased severity, when compared to a hypersensitive response caused in a plant by the unmodified R protein in the presence of the effector protein.

[0140] If desired, the altered coding sequences can then used in assays for determining if the protein encoded thereby initiates in a plant a hypersensitive response of increased severity in the presence of the effector when compared to the R protein encoded by the unaltered coding sequence. An example of a preferred method for determining if the protein encoded by an altered coding sequence initiates in a plant a hypersensitive response in the presence of an effector, including how to determine the severity of the hypersensitive response, is described above and also set forth below in Example 1.

[0141] The methods for enhancing the resistance of a plant to at least one plant pathogen find use in increasing or enhancing the resistance of plants, particularly agricultural or crop plants, to plant pathogens. The methods of the invention can be used with any plant species including monocots and dicots. Preferred plants include Solanaceous plants, such as, for example, potato (Solanum tuberosum), tomato (Lycopersicon esculentum), eggplant (Solanum melongena), pepper (Capsicum spp.; e.g., Capsicum annuum, C. baccatum, C. chinense, C. frutescens, C. pubescens, and the like), tobacco (Nicotiana tabacum, Nicotiana benthamiana), and petunia (Petunia spp., e.g., Petunia×hybrida or Petunia hybrida). Preferred plants of the invention also include any plants that known to be infected by P. infestans or other plant pathogenic Phytophthora species such as, for example, eggplant (Solanum melongena), petunia (Petunia×hybrida), Physalis sp., woody nightshade (Solanum dulcamara), garden huckleberry (Solanum scabrum), gboma eggplant (Solanum macrocarpon), the asteraceous weeds, Ageratum conyzoides and Solanecio biafrae, palms, cocoa (Theobroma cacao), lamb's lettuce (Valerianella locusta), and spinach (Spinacia oleracea).

[0142] The present invention further provides methods of selecting a potato plant for enhanced resistance to Phytophthora infestans. The methods comprise screening one or more potato plants or parts or cells thereof for nucleotide sequence encoding a modified R3a protein or for a modified R3a protein, wherein the modified R3a protein is capable of inducing a hypersensitive response in a plant in the presence of AVR3a^{EM}, and selecting a potato plant comprising the nucleotide sequence encoding a modified R3a protein or the modified R3a protein. Preferably, the modified R3a protein comprises at least one amino acid substitution as set forth in FIG. 3. More preferably, the modified R3a protein comprises at least one amino acid substitution in the LRR domain as set forth in FIG. 3. In certain embodiments of the invention, the modified R3a protein comprises the amino acid sequence set forth in SEQ ID NO: 4, 6, 8, 10, 12, 14, 16, 18, 20, 22, 24, 26, 28, 30, 32, 34, 36, 43, 45, 47, 49, 51, or 53 or is encoded in the genome of the potato plant by the nucleotide sequence set forth in SEQ ID NO: 3, 5, 7, 9, 11, 13, 15, 17, 19, 21, 23, 25, 27, 29, 31, 33, 35, 42, 44, 46, 48, 50, or 52.

[0143] Any methods disclosed herein or otherwise known in the art can be used to screen the one or more potato plants or parts or cells thereof for nucleotide sequence encoding a modified R3a protein including, for example, nucleic acid sequencing and/or methods involving PCR. Likewise, any methods disclosed herein or otherwise known in the art can be used to screen the one or more potato plants or parts or cells thereof for a modified R3a protein, including, for example, amino acid sequencing and immunological methods that discriminate between a wild-type R3a protein and a modified R3a protein.

[0144] In certain embodiments of the invention, the potato plants to be screened are from a population of potato plants that are expected to comprise some plants with modified R3a proteins. Such populations can include, for example, populations with naturally occurring genetic variation or populations that comprise induced mutations that are the result of treating potato plants or parts or seeds thereof with, for example, a chemical mutagen or radiation. In other embodiments of the invention, a TILLING (targeting induced local lesions in genomes) population is screened. The use of TILLING populations is disclosed in McCallum et al. (2000) Plant Physiol. 123:439-442; Slade et al. (2005) Nature Biotech. 23:75-81; Oleykowski et al. (1998) Nuc. Acids Res. 26:4597-4602; Neff et al. (1998) Plant J. 14:387-392; all of which are herein incorporated by reference.

[0145] It is recognized that potato plants selected for enhanced resistance to Phytophthora infestans by the methods of the present invention find use in breeding potato cultivars with enhanced resistance Phytophthora infestans. Thus, the invention further provides methods of enhancing the resistance of a potato plant to Phytophthora infestans. The methods comprise crossing a first potato plant with a second potato plant, wherein the first potato plant that was selected for enhanced resistance to Phytophthora infestans as disclosed above. Progeny plants resulting from said crossing comprise enhanced resistance to Phytophthora infestans, when compared to the resistance of at least one of the first plant and the second plant. The invention further encompasses the progeny plant and its descendants comprising the enhanced resistance as well as plant parts, plant cells and seeds thereof.

[0146] While the present invention does not depend on particular biological mechanism, it is recognized that the R3a protein may act in vivo as dimer and that the presence of an R3a protein and a modified R3a protein of the present invention in the same plant and/or cell may in some situations delay, inhibit, or otherwise negatively affect the triggering of HR by the modified R3a protein in the plant or cell in the presence of AVR3a^{EM}. It is further recognized that in certain embodiments of the invention it may be advantageous to express in a plant, particularly a potato plant, a modified R3a protein at a sufficiently high level to overcome or lessen any negative effect due to the presence of an R3a in the plant or cell thereof, particularly R3a expressed from an endogenous or native R3a gene. In other embodiments, the methods of the present invention can comprise reducing or eliminating the expression of an endogenous or native R3a gene in plant or cell thereof using any method disclosed herein or otherwise known in the art. Such methods of reducing or eliminating the expression of a gene include, for example, in vivo targeted mutagenesis, homologous recombination, and mutation breeding. In one embodiment of the methods of the present invention, the expression of an endogenous or native R3a gene is eliminated in a plant by the replacement of the endogenous or native R3a gene or part thereof with a polynucleotide encoding a modified R3a protein or part thereof through a method involving homologous recombination as described hereinabove. In such an embodiment, the methods can further comprise selfing a heterozygous plant comprising one copy of the polynucleotide and one copy of the endogenous or native R3a gene and selecting for a progeny plant that is homozygous for the polynucleotide.

[0147] Nucleic acid molecules of the present invention that comprise nucleotide sequences encoding AVR3a homologs from Phytophthora palmivora include, but are not limited to, nucleic acid molecules encoding an amino acid sequence set forth in SEQ ID NO: 54, 55, 56, 57, 58, 59, 60, 61, 62, 63, 64, 65, 66, 67, 68, 69, 70, 71, 72, 73, 74, 75, 76, 77, 78, 79, 80, 81, 82, 83, or 84. Polypeptides of the present invention that are AVR3a homologs from Phytophthora palmivora invention include, but are not limited to, polypeptides comprising: an amino acid sequence set forth in SEQ ID NO: 54, 55, 56, 57, 58, 59, 60, 61, 62, 63, 64, 65, 66, 67, 68, 69, 70, 71, 72, 73, 74, 75, 76, 77, 78, 79, 80, 81, 82, 83, or 84. Such nucleic acid molecules and polypeptides find use in the methods disclosed herein for making modified R3a proteins, particularly modified R3a proteins that are capable of inducing a hypersensitive response in a plant in the presence of one or more AVR3a homologs from Phytophthora palmivora. It is recognized that nucleic acid molecules encoding the AVR3a homologs of the present invention can be used in any of the methods disclosed herein which involve the use of nucleic acid molecules encoding AVR3a^{KI} and/or AVR3a^{EM}.

[0148] The present invention encompasses isolated or substantially purified polynucleotide (also referred to herein as “nucleic acid molecule”, “nucleic acid” and the like) or protein (also referred to herein as “polypeptide”) compositions. An “isolated” or “purified” polynucleotide or protein, or biologically active portion thereof, is substantially or essentially free from components that normally accompany or interact with the polynucleotide or protein as found in its naturally occurring environment. Thus, an isolated or purified polynucleotide or protein is substantially free of other cellular material or culture medium when produced by recombinant techniques, or substantially free of chemical precursors or other chemicals when chemically synthesized. Optimally, an “isolated” polynucleotide is free of sequences (optimally protein encoding sequences) that naturally flank the polynucleotide (i.e., sequences located at the 5′ and 3′ ends of the polynucleotide) in the genomic DNA of the organism from which the polynucleotide is derived. For example, in various embodiments, the isolated polynucleotide can contain less than about 5 kb, 4 kb, 3 kb, 2 kb, 1 kb, 0.5 kb, or 0.1 kb of nucleotide sequence that naturally flank the polynucleotide in genomic DNA of the cell from which the polynucleotide is derived. A protein that is substantially free of cellular material includes preparations of protein having less than about 30%, 20%, 10%, 5%, or 1% (by dry weight) of contaminating protein. When the protein of the invention or biologically active portion thereof is recombinantly produced, optimally culture medium represents less than about 30%, 20%, 10%, 5%, or 1% (by dry weight) of chemical precursors or non-protein-of-interest chemicals.

[0149] Fragments and variants of the disclosed polynucleotides and proteins encoded thereby are also encompassed by the present invention. By “fragment” is intended a portion of the polynucleotide or a portion of the amino acid sequence and hence protein encoded thereby. Fragments of polynucleotides comprising coding sequences may encode protein fragments that retain biological activity of the full-length or native protein and hence retain the ability to initiate in a plant a hypersensitive response in the presence of a effector protein from a plant pathogen. Alternatively, fragments of a polynucleotide that are useful as hybridization probes generally do not encode proteins that retain biological activity or do not retain promoter activity. Thus, fragments of a nucleotide sequence may range from at least about 20 nucleotides, about 50 nucleotides, about 100 nucleotides, and up to the full-length polynucleotide of the invention.

[0150] A fragment of a modified R protein that encodes a biologically active portion of a modified R protein of the invention will encode at least 15, 25, 30, 50, 100, 150, 200, 250, 300, 500, 600, 700, 800, 900, 1000, 1100, or 1200 contiguous amino acids, or up to the total number of amino acids present in a full-length, modified R protein of the invention (for example, 1282 amino acids for each of SEQ ID NOS: 4, 6, 8, 10, 12, 14, 16, 18, 20, 22, 24, 26, 28, 30, 32, 34, 36, 43, 45, 47, 49, 51, and 53). Fragments of a modified R polynucleotide that are useful as hybridization probes or PCR primers generally need not encode a biologically active portion of a modified R protein.

[0151] Thus, a fragment of a modified R polynucleotide may encode a biologically active portion of a modified R protein, or it may be a fragment that can be used as a hybridization probe or PCR primer using methods disclosed below. A biologically active portion of a modified R protein can be prepared by isolating a portion of one of the modified R polynucleotides of the invention, expressing the encoded portion of the modified R protein (e.g., by recombinant expression in vitro), and assessing the activity of the encoded portion of the modified R protein. Polynucleotides that are fragments of a modified R nucleotide sequence comprise at least 16, 20, 50, 75, 100, 125, 150, 175, 200, 250, 300, 350, 400, 450, 500, 550, 600, 650, 700, 800, 900, 1000, 1100, 1200, 1300, 1400, 1500, 2000, 2500, 3000, or 3500 contiguous nucleotides, or up to the number of nucleotides present in a full-length modified R polynucleotide disclosed herein (for example, 3849 nucleotides for each of SEQ ID NOS: 3, 5, 7, 9, 11, 13, 15, 17, 19, 21, 23, 25, 27, 29, 31, 33, 35, 42, 44, 46, 48, 50, and 52).

[0152] A fragment of an AVR3a homolog that encodes a biologically active portion of an AVR3a homolog of the invention will encode at least 15, 25, 30, 50, 75, 100, 110, 120, 130, or 140 contiguous amino acids, or up to the total number of amino acids present in a full-length, AVR3a homolog of the invention. Fragments of an AVR3a homolog that are useful as hybridization probes or PCR primers generally need not encode a biologically active portion of an AVR3a homolog.

[0153] Thus, a fragment of an AVR3a homolog may encode a biologically active portion of an AVR3a homolog, or it may be a fragment that can be used as a hybridization probe or PCR primer using methods disclosed below. A biologically active portion of an AVR3a homolog can be prepared by isolating a portion of one of the AVR3a homolog polynucleotides of the invention, expressing the encoded portion of the AVR3a homolog (e.g., by recombinant expression in vitro), and assessing the activity of the encoded portion of the AVR3a homolog. Polynucleotides that are fragments of an AVR3a homolog nucleotide sequence comprise at least 16, 20, 50, 75, 100, 125, 150, 175, 200, 250, 300, 325, 350, 375, 400, or 420 contiguous nucleotides, or up to the number of nucleotides present in a full-length an AVR3a homolog disclosed herein.

[0154] “Variants” is intended to mean substantially similar sequences. For polynucleotides, a variant comprises a polynucleotide having deletions (i.e., truncations) at the 5′ and/or 3′ end; deletion and/or addition of one or more nucleotides at one or more internal sites in the native polynucleotide; and/or substitution of one or more nucleotides at one or more sites in the native polynucleotide. As used herein, a “native” polynucleotide or polypeptide comprises a naturally occurring nucleotide sequence or amino acid sequence, respectively. For polynucleotides, conservative variants include those sequences that, because of the degeneracy of the genetic code, encode the amino acid sequence of one of the modified R proteins or AVR3a homologs of the invention. Naturally occurring allelic variants such as these can be identified with the use of well-known molecular biology techniques, as, for example, with polymerase chain reaction (PCR) and hybridization techniques as outlined below. Variant polynucleotides also include synthetically derived polynucleotides, such as those generated, for example, by using site-directed mutagenesis but which still encode a modified R protein or an AVR3a homolog of the invention. Generally, variants of a particular polynucleotide of the invention will have at least about 40%, 45%, 50%, 55%, 60%, 65%, 70%, 75%, 80%, 85%, 90%, 91%, 92%, 93%, 94%, 95%, 96%, 97%, 98%, 99% or more sequence identity to that particular polynucleotide as determined by sequence alignment programs and parameters as described elsewhere herein.

[0155] Variants of a particular polynucleotide of the invention (i.e., the reference polynucleotide) can also be evaluated by comparison of the percent sequence identity between the polypeptide encoded by a variant polynucleotide and the polypeptide encoded by the reference polynucleotide. Thus, for example, a polynucleotide that encodes a polypeptide with a given percent sequence identity to the polypeptide of SEQ ID NO: 4, 6, 8, 10, 12, 14, 16, 18, 20, 22, 24, 26, 28, 30, 32, 34, 36, 43, 45, 47, 49, 51, 53, 54, 55, 56, 57, 58, 59, 60, 61, 62, 63, 64, 65, 66, 67, 68, 69, 70, 71, 72, 73, 74, 75, 76, 77, 78, 79, 80, 81, 82, 83, or 84 are disclosed. Percent sequence identity between any two polypeptides can be calculated using sequence alignment programs and parameters described elsewhere herein. Where any given pair of polynucleotides of the invention is evaluated by comparison of the percent sequence identity shared by the two polypeptides they encode, the percent sequence identity between the two encoded polypeptides is at least about 60%, 65%, 70%, 75%, 80%, 85%, 90%, 91%, 92%, 93%, 94%, 95%, 96%, 97%, 98%, 99% or more sequence identity.

[0156] “Variant” protein is intended to mean a protein derived from the native protein by deletion (so-called truncation) of one or more amino acids at the N-terminal and/or C-terminal end of the native protein; deletion and/or addition of one or more amino acids at one or more internal sites in the native protein; or substitution of one or more amino acids at one or more sites in the native protein. Preferred, variant proteins encompassed by the present invention are biologically active, that is they continue to possess the desired biological activity of the native protein. For the modified R protein, the preferred biological activity is HR activity in a plant, plant part, plant cell in the presence of AVR3a^{KI} and optionally also comprise HR activity in a plant, plant part, plant cell in the presence of AVR3a^{EM} as described herein. For the AVR3a homologs, the preferred biological activity is the capability of inducing HR activity in a plant, plant part, plant cell in the presence of at least one R protein as described herein. Such variants may result from, for example, genetic polymorphism or from human manipulation. Biologically active variants of a modified R protein or AVR3a homolog of the invention will have at least about 60%, 65%, 70%, 75%, 80%, 85%, 90%, 91%, 92%, 93%, 94%, 95%, 96%, 97%, 98%, 99% or more sequence identity to the amino acid sequence for the native protein as determined by sequence alignment programs and parameters described elsewhere herein. A biologically active variant of a protein of the invention may differ from that protein by as few as 1-15 amino acid residues, as few as 1-10, such as 6-10, as few as 5, as few as 4, 3, 2, or even 1 amino acid residue.

[0157] Preferably, the fragments and variants of a modified R3a protein and other modified R proteins of the present invention will possess 1, 2, 3, 4, 5, 6, 7, or more of the amino acids substitutions (relative to the wild-type R3a protein) of the modified R3a protein and comprise HR activity in a plant, plant part, or plant cell in the presence of AVR3a^{EM}. More preferably, the fragments and variants of a modified R3a protein and other modified R protein of the present invention will possess at least one amino acid substitution that is in the leucine-rich repeat (LRR) domain of the modified R3a protein and comprise HR activity in a plant, plant part, or plant cell in the presence of AVR3a^{EM}. Most preferably, the fragments and variants of a modified R3a protein and other modified R protein of the present invention will possess at least one amino acid substitution that is in the leucine-rich repeat (LRR) domain of the modified R3a protein and comprise HR activity in a plant, plant part, or plant cell in the presence of AVR3a^{EM}, AVR3a^{KI} or both AVR3a^{EM} and AVR3a^{KI}. The amino acid substitutions (relative to the wild-type R3a) of the modified R3a proteins are summarized in FIG. 3. The present invention also encompasses the polynucleotides that encode such fragments and variants.

[0158] In certain embodiments of the invention, the modified R3a proteins of comprise HR activity in a plant, plant part, or plant cell in the presence of AVR3a^{KI} and/or AVR3a^{EM} and at least one AVR3a homolog from a Phytophthora species other than P. infestans. The present invention encompasses fragments and variants of such modified R3a proteins that r comprise HR activity in a plant, plant part, or plant cell in the presence of AVR3a^{KI} and/or AVR3a^{EM} and at least one AVR3a homolog from a Phytophthora species other than P. infestans and further encompasses polynucleotides that encode such fragments and variants.

[0159] The proteins of the invention may be altered in various ways including amino acid substitutions, deletions, truncations, and insertions. Methods for such manipulations are generally known in the art. For example, amino acid sequence variants and fragments of the polynucleotide R proteins can be prepared by mutations in the DNA. Methods for mutagenesis and polynucleotide alterations are well known in the art. See, for example, Kunkel (1985) Proc. Natl. Acad. Sci. USA 82:488-492; Kunkel et al. (1987) Methods in Enzymol. 154:367-382; U.S. Pat. No. 4,873,192; Walker and Gaastra, eds. (1983) Techniques in Molecular Biology (MacMillan Publishing Company, New York) and the references cited therein. Guidance as to appropriate amino acid substitutions that do not affect biological activity of the protein of interest may be found in the model of Dayhoff et al. (1978) Atlas of Protein Sequence and Structure (Natl. Biomed. Res. Found., Washington, D.C.), herein incorporated by reference. Conservative substitutions, such as exchanging one amino acid with another having similar properties, may be optimal.

[0160] Thus, the genes and polynucleotides of the invention include both the naturally occurring sequences as well as mutant forms Likewise, the proteins of the invention encompass both naturally occurring proteins as well as variations and modified forms thereof. Such variants will continue to possess the desired biological activity of the modified R protein, particularly the ability to initiate in a plant a hypersensitive response in the presence of an effector protein from a plant pathogen. Obviously, the mutations that will be made in the DNA encoding the variant must not place the sequence out of reading frame and optimally will not create complementary regions that could produce secondary mRNA structure. See, EP Patent Application Publication No. 75,444.

[0161] The deletions, insertions, and substitutions of the protein sequences encompassed herein are not expected to produce radical changes in the characteristics of the protein. However, when it is difficult to predict the exact effect of the substitution, deletion, or insertion in advance of doing so, one skilled in the art will appreciate that the effect will be evaluated by routine screening assays. That is, the activity can be evaluated by R protein activity assays. See, for example, Van der Hoorn et al. (2000) Mol. Plant-Microbe Interact. 13:439-446; Bos et al. (2006) Plant J. 48:165-176; Bos et al. (2009) Mol. Plant-Microbe Interact. 22: 269-281; herein incorporated by reference.

[0162] Variant polynucleotides and proteins also encompass sequences and proteins derived from a mutagenic and recombinogenic procedure such as DNA shuffling. Strategies for such DNA shuffling are known in the art. See, for example, Stemmer (1994) Proc. Natl. Acad. Sci. USA 91:10747-10751; Stemmer (1994) Nature 370:389-391; Crameri et al. (1997) Nature Biotech. 15:436-438; Moore et al. (1997) J. Mol. Biol. 272:336-347; Zhang et al. (1997) Proc. Natl. Acad. Sci. USA 94:4504-4509; Crameri et al. (1998) Nature 391:288-291; and U.S. Pat. Nos. 5,605,793 and 5,837,458.

[0163] The polynucleotides of the invention can be used to isolate corresponding sequences from other organisms, particularly other plants. In this manner, methods such as PCR, hybridization, and the like can be used to identify such sequences based on their sequence homology to the sequences set forth herein. Sequences isolated based on their sequence identity to the entire sequences set forth herein or to variants and fragments thereof are encompassed by the present invention. Such sequences include sequences that are orthologs of the disclosed sequences. “Orthologs” is intended to mean genes derived from a common ancestral gene and which are found in different species as a result of speciation. Genes found in different species are considered orthologs when their nucleotide sequences and/or their encoded protein sequences share at least 60%, 70%, 75%, 80%, 85%, 90%, 91%, 92%, 93%, 94%, 95%, 96%, 97%, 98%, 99%, or greater sequence identity. Functions of orthologs are often highly conserved among species. Thus, isolated polynucleotides that encode modified R proteins or AVR3a homologs and which hybridize under stringent conditions to at least one of the modified R polynucleotides or AVR3a homolog polynucleotides disclosed herein, or to variants or fragments thereof, are encompassed by the present invention.

[0164] In a PCR approach, oligonucleotide primers can be designed for use in PCR reactions to amplify corresponding DNA sequences from cDNA or genomic DNA extracted from any plant of interest. Methods for designing PCR primers and PCR cloning are generally known in the art and are disclosed in Sambrook et al. (1989) Molecular Cloning: A Laboratory Manual (2d ed., Cold Spring Harbor Laboratory Press, Plainview, N.Y.). See also Innis et al., eds. (1990) PCR Protocols: A Guide to Methods and Applications (Academic Press, New York); Innis and Gelfand, eds. (1995) PCR Strategies (Academic Press, New York); and Innis and Gelfand, eds. (1999) PCR Methods Manual (Academic Press, New York). Known methods of PCR include, but are not limited to, methods using paired primers, nested primers, single specific primers, degenerate primers, gene-specific primers, vector-specific primers, partially-mismatched primers, and the like.

[0165] In hybridization techniques, all or part of a known polynucleotide is used as a probe that selectively hybridizes to other corresponding polynucleotides present in a population of cloned genomic DNA fragments or cDNA fragments (i.e., genomic or cDNA libraries) from a chosen organism. The hybridization probes may be genomic DNA fragments, cDNA fragments, RNA fragments, or other oligonucleotides, and may be labeled with a detectable group such as ³²P, or any other detectable marker. Thus, for example, probes for hybridization can be made by labeling synthetic oligonucleotides based on the polynucleotides of the invention. Methods for preparation of probes for hybridization and for construction of cDNA and genomic libraries are generally known in the art and are disclosed in Sambrook et al. (1989) Molecular Cloning: A Laboratory Manual (2d ed., Cold Spring Harbor Laboratory Press, Plainview, N.Y.).

[0166] For example, an entire polynucleotide disclosed herein, or one or more portions thereof, may be used as a probe capable of specifically hybridizing to corresponding polynucleotide and messenger RNAs. To achieve specific hybridization under a variety of conditions, such probes include sequences that are unique among the sequence of the gene or cDNA of interest sequences and are optimally at least about 10 nucleotides in length, and most optimally at least about 20 nucleotides in length. Such probes may be used to amplify corresponding polynucleotides for the particular gene of interest from a chosen plant by PCR. This technique may be used to isolate additional coding sequences from a desired plant or as a diagnostic assay to determine the presence of coding sequences in a plant. Hybridization techniques include hybridization screening of plated DNA libraries (either plaques or colonies; see, for example, Sambrook et al. (1989) Molecular Cloning: A Laboratory Manual (2d ed., Cold Spring Harbor Laboratory Press, Plainview, N.Y.).

[0167] Hybridization of such sequences may be carried out under stringent conditions. By “stringent conditions” or “stringent hybridization conditions” is intended conditions under which a probe will hybridize to its target sequence to a detectably greater degree than to other sequences (e.g., at least 2-fold over background). Stringent conditions are sequence-dependent and will be different in different circumstances. By controlling the stringency of the hybridization and/or washing conditions, target sequences that are 100% complementary to the probe can be identified (homologous probing). Alternatively, stringency conditions can be adjusted to allow some mismatching in sequences so that lower degrees of similarity are detected (heterologous probing). Generally, a probe is less than about 1000 nucleotides in length, optimally less than 500 nucleotides in length.

[0168] Typically, stringent conditions will be those in which the salt concentration is less than about 1.5 M Na ion, typically about 0.01 to 1.0 M Na ion concentration (or other salts) at pH 7.0 to 8.3 and the temperature is at least about 30° C. for short probes (e.g., 10 to 50 nucleotides) and at least about 60° C. for long probes (e.g., greater than 50 nucleotides). Stringent conditions may also be achieved with the addition of destabilizing agents such as formamide. Exemplary low stringency conditions include hybridization with a buffer solution of 30 to 35% formamide, 1 M NaCl, 1% SDS (sodium dodecyl sulphate) at 37° C., and a wash in 1× to 2×SSC (20×SSC=3.0 M NaCl/0.3 M trisodium citrate) at 50 to 55° C. Exemplary moderate stringency conditions include hybridization in 40 to 45% formamide, 1.0 M NaCl, 1% SDS at 37° C., and a wash in 0.5× to 1×SSC at 55 to 60° C. Exemplary high stringency conditions include hybridization in 50% formamide, 1 M NaCl, 1% SDS at 37° C., and a wash in 0.1×SSC at 60 to 65° C. Optionally, wash buffers may comprise about 0.1% to about 1% SDS. Duration of hybridization is generally less than about 24 hours, usually about 4 to about 12 hours. The duration of the wash time will be at least a length of time sufficient to reach equilibrium.

[0169] Specificity is typically the function of post-hybridization washes, the critical factors being the ionic strength and temperature of the final wash solution. For DNA-DNA hybrids, the Tₘ can be approximated from the equation of Meinkoth and Wahl (1984) Anal. Biochem. 138:267-284: Tₘ=81.5° C.+16.6 (log M)+0.41 (% GC)−0.61 (% form)−500/L; where M is the molarity of monovalent cations, % GC is the percentage of guanosine and cytosine nucleotides in the DNA, % form is the percentage of formamide in the hybridization solution, and L is the length of the hybrid in base pairs. The Tₘ is the temperature (under defined ionic strength and pH) at which 50% of a complementary target sequence hybridizes to a perfectly matched probe. Tₘ is reduced by about 1° C. for each 1% of mismatching; thus, Tₘ, hybridization, and/or wash conditions can be adjusted to hybridize to sequences of the desired identity. For example, if sequences with >90% identity are sought, the Tₘ can be decreased 10° C. Generally, stringent conditions are selected to be about 5° C. lower than the thermal melting point (Tₘ) for the specific sequence and its complement at a defined ionic strength and pH. However, severely stringent conditions can utilize a hybridization and/or wash at 1, 2, 3, or 4° C. lower than the thermal melting point (Tₘ); moderately stringent conditions can utilize a hybridization and/or wash at 6, 7, 8, 9, or 10° C. lower than the thermal melting point (Tₘ); low stringency conditions can utilize a hybridization and/or wash at 11, 12, 13, 14, 15, or 20° C. lower than the thermal melting point (Tₘ). Using the equation, hybridization and wash compositions, and desired Tₘ, those of ordinary skill will understand that variations in the stringency of hybridization and/or wash solutions are inherently described. If the desired degree of mismatching results in a Tₘ of less than 45° C. (aqueous solution) or 32° C. (formamide solution), it is optimal to increase the SSC concentration so that a higher temperature can be used. An extensive guide to the hybridization of nucleic acids is found in Tijssen (1993) Laboratory Techniques in Biochemistry and Molecular Biology—Hybridization with Nucleic Acid Probes, Part I, Chapter 2 (Elsevier, New York); and Ausubel et al., eds. (1995) Current Protocols in Molecular Biology, Chapter 2 (Greene Publishing and Wiley-Interscience, New York). See Sambrook et al. (1989) Molecular Cloning: A Laboratory Manual (2d ed., Cold Spring Harbor Laboratory Press, Plainview, N.Y.).

[0170] It is recognized that the modified R protein polynucleotide molecules and modified R proteins of the invention encompass polynucleotide molecules and proteins comprising a nucleotide or an amino acid sequence that is sufficiently identical to the nucleotide sequence of SEQ ID NOS: 1 and/or 3, or to the amino acid sequence of SEQ ID NO: 2. It is further recognized that the polynucleotide molecules and proteins of the invention encompass polynucleotide molecules and proteins comprising a nucleotide or an amino acid sequence that is sufficiently identical to the nucleotide sequence of SEQ ID NOS: 3, 5, 7, 9, 11, 13, 15, 17, 19, 21, 23, 25, 27, 29, 31, 33, 35, 42, 44, 46, 48, 50, and/or 52 or to the amino acid sequence of SEQ ID NO: 4, 6, 8, 10, 12, 14, 16, 18, 20, 22, 24, 26, 28, 30, 32, 34, 36, 43, 45, 47, 49, 51, and/or 53.

[0171] It is further recognized that the AVR3a homolog polynucleotide molecules and AVR3a homolog proteins of the invention encompass polynucleotide molecules and proteins comprising nucleotide sequences that encode an amino acid sequence that is sufficiently identical to the amino sequence of SEQ ID NOS: 54, 55, 56, 57, 58, 59, 60, 61, 62, 63, 64, 65, 66, 67, 68, 69, 70, 71, 72, 73, 74, 75, 76, 77, 78, 79, 80, 81, 82, 83, and/or 84 or an amino acid sequence that is sufficiently identical to the nucleotide sequence of SEQ ID NOS: 54, 55, 56, 57, 58, 59, 60, 61, 62, 63, 64, 65, 66, 67, 68, 69, 70, 71, 72, 73, 74, 75, 76, 77, 78, 79, 80, 81, 82, 83, or 84.

[0172] The term “sufficiently identical” is used herein to refer to a first amino acid or nucleotide sequence that contains a sufficient or minimum number of identical or equivalent (e.g., with a similar side chain) amino acid residues or nucleotides to a second amino acid or nucleotide sequence such that the first and second amino acid or nucleotide sequences have a common structural domain and/or common functional activity. For example, amino acid or nucleotide sequences that contain a common structural domain having at least about 45%, 55%, or 65% identity, preferably 75% identity, more preferably 85%, 90%, 95%, 96%, 97%, 98% or 99% identity are defined herein as sufficiently identical.

[0173] To determine the percent identity of two amino acid sequences or of two nucleic acids, the sequences are aligned for optimal comparison purposes. The percent identity between the two sequences is a function of the number of identical positions shared by the sequences (i.e., percent identity=number of identical positions/total number of positions (e.g., overlapping positions)×100). In one embodiment, the two sequences are the same length. The percent identity between two sequences can be determined using techniques similar to those described below, with or without allowing gaps. In calculating percent identity, typically exact matches are counted.

[0174] The determination of percent identity between two sequences can be accomplished using a mathematical algorithm. A preferred, nonlimiting example of a mathematical algorithm utilized for the comparison of two sequences is the algorithm of Karlin and Altschul (1990) Proc. Natl. Acad. Sci. USA 87:2264, modified as in Karlin and Altschul (1993) Proc. Natl. Acad. Sci. USA 90:5873-5877. Such an algorithm is incorporated into the NBLAST and XBLAST programs of Altschul et al. (1990) J. Mol. Biol. 215:403. BLAST nucleotide searches can be performed with the NBLAST program, score=100, wordlength=12, to obtain nucleotide sequences homologous to the polynucleotide molecules of the invention. BLAST protein searches can be performed with the XBLAST program, score=50, wordlength=3, to obtain amino acid sequences homologous to protein molecules of the invention. To obtain gapped alignments for comparison purposes, Gapped BLAST can be utilized as described in Altschul et al. (1997) Nucleic Acids Res. 25:3389. Alternatively, PSI-Blast can be used to perform an iterated search that detects distant relationships between molecules. See Altschul et al. (1997) supra. When utilizing BLAST, Gapped BLAST, and PSI-Blast programs, the default parameters of the respective programs (e.g., XBLAST and NBLAST) can be used. See http://www.ncbi.nlm.nih.gov. Another preferred, non-limiting example of a mathematical algorithm utilized for the comparison of sequences is the algorithm of Myers and Miller (1988) CABIOS 4:11-17. Such an algorithm is incorporated into the ALIGN program (version 2.0), which is part of the GCG sequence alignment software package. When utilizing the ALIGN program for comparing amino acid sequences, a PAM120 weight residue table, a gap length penalty of 12, and a gap penalty of 4 can be used. Alignment may also be performed manually by inspection.

[0175] Unless otherwise stated, sequence identity/similarity values provided herein refer to the value obtained using the full-length sequences of the invention and using multiple alignment by mean of the algorithm Clustal W (Nucleic Acid Research, 22(22):4673-4680, 1994) using the program AlignX included in the software package Vector NTI Suite Version 7 (InforMax, Inc., Bethesda, Md., USA) using the default parameters; or any equivalent program thereof. By “equivalent program” is intended any sequence comparison program that, for any two sequences in question, generates an alignment having identical nucleotide or amino acid residue matches and an identical percent sequence identity when compared to the corresponding alignment generated by CLUSTALW (Version 1.83) using default parameters (available at the European Bioinformatics Institute website: http://www.ebi.ac.uk/Tools/clustalw/index.html).

[0176] The use of the term “polynucleotide” is not intended to limit the present invention to polynucleotides comprising DNA. Those of ordinary skill in the art will recognize that polynucleotides, can comprise ribonucleotides and combinations of ribonucleotides and deoxyribonucleotides. Such deoxyribonucleotides and ribonucleotides include both naturally occurring molecules and synthetic analogues. The polynucleotides of the invention also encompass all forms of sequences including, but not limited to, single-stranded forms, double-stranded forms, hairpins, stem-and-loop structures, and the like.

[0177] The modified R polynucleotide or AVR3a homolog of the invention comprising modified R protein or AVR3a homolog coding sequences can be provided in expression cassettes for expression in the plant or other organism or non-human host cell of interest. The cassette will include 5′ and 3′ regulatory sequences operably linked to a modified R or AVR3a homolog polynucleotide of the invention. “Operably linked” is intended to mean a functional linkage between two or more elements. For example, an operable linkage between a polynucleotide or gene of interest and a regulatory sequence (i.e., a promoter) is functional link that allows for expression of the polynucleotide of interest. Operably linked elements may be contiguous or non-contiguous. When used to refer to the joining of two protein coding regions, by operably linked is intended that the coding regions are in the same reading frame. The cassette may additionally contain at least one additional gene to be cotransformed into the organism. Alternatively, the additional gene(s) can be provided on multiple expression cassettes. Such an expression cassette is provided with a plurality of restriction sites and/or recombination sites for insertion of the modified R or AVR3a homolog polynucleotide to be under the transcriptional regulation of the regulatory regions. The expression cassette may additionally contain selectable marker genes.

[0178] The expression cassette will include in the 5′-3′ direction of transcription, a transcriptional and translational initiation region (i.e., a promoter), a modified R or AVR3a homolog polynucleotide of the invention, and a transcriptional and translational termination region (i.e., termination region) functional in plants or other organism or non-human host cell. The regulatory regions (i.e., promoters, transcriptional regulatory regions, and translational termination regions) and/or the modified R or AVR3a homolog polynucleotide or of the invention may be native/analogous to the host cell or to each other. Alternatively, the regulatory regions and/or the modified R polynucleotide or AVR3a homolog polynucleotide of the invention may be heterologous to the host cell or to each other. As used herein, “heterologous” in reference to a sequence is a sequence that originates from a foreign species, or, if from the same species, is substantially modified from its native form in composition and/or genomic locus by deliberate human intervention. For example, a promoter operably linked to a heterologous polynucleotide is from a species different from the species from which the polynucleotide was derived, or, if from the same/analogous species, one or both are substantially modified from their original form and/or genomic locus, or the promoter is not the native promoter for the operably linked polynucleotide. As used herein, a chimeric gene comprises a coding sequence operably linked to a transcription initiation region that is heterologous to the coding sequence.

[0179] While it may be optimal to express the modified R coding sequences using heterologous promoters, the native promoter sequence of the unmodified R gene may be used.

[0180] The termination region may be native with the transcriptional initiation region, may be native with the operably linked modified R polynucleotide or AVR3a homolog polynucleotide of interest, may be native with the plant host, or may be derived from another source (i.e., foreign or heterologous) to the promoter, the modified R polynucleotide or AVR3a homolog polynucleotide of interest, the plant host, or any combination thereof. Convenient termination regions are available from the Ti-plasmid of A. tumefaciens, such as the octopine synthase and nopaline synthase termination regions. See also Guerineau et al. (1991) Mol. Gen. Genet. 262:141-144; Proudfoot (1991) Cell 64:671-674; Sanfacon et al. (1991) Genes Dev. 5:141-149; Mogen et al. (1990) Plant Cell 2:1261-1272; Munroe et al. (1990) Gene 91:151-158; Ballas et al. (1989) Nucleic Acids Res. 17:7891-7903; and Joshi et al. (1987) Nucleic Acids Res. 15:9627-9639.

[0181] Where appropriate, the polynucleotides may be optimized for increased expression in the transformed plant. That is, the polynucleotides can be synthesized using plant-preferred codons for improved expression. See, for example, Campbell and Gowri (1990) Plant Physiol. 92:1-11 for a discussion of host-preferred codon usage. Methods are available in the art for synthesizing plant-preferred genes. See, for example, U.S. Pat. Nos. 5,380,831, and 5,436,391, and Murray et al. (1989) Nucleic Acids Res. 17:477-498, herein incorporated by reference.

[0182] Additional sequence modifications are known to enhance gene expression in a cellular host. These include elimination of sequences encoding spurious polyadenylation signals, exon-intron splice site signals, transposon-like repeats, and other such well-characterized sequences that may be deleterious to gene expression. The G-C content of the sequence may be adjusted to levels average for a given cellular host, as calculated by reference to known genes expressed in the host cell. When possible, the sequence is modified to avoid predicted hairpin secondary mRNA structures.

[0183] The expression cassettes may additionally contain 5′ leader sequences. Such leader sequences can act to enhance translation. Translation leaders are known in the art and include: picornavirus leaders, for example, EMCV leader (Encephalomyocarditis 5′ noncoding region) (Elroy-Stein et al. (1989) Proc. Natl. Acad. Sci. USA 86:6126-6130); potyvirus leaders, for example, TEV leader (Tobacco Etch Virus) (Gallie et al. (1995) Gene 165(2):233-238), MDMV leader (Maize Dwarf Mosaic Virus) (Virology 154:9-20), and human immunoglobulin heavy-chain binding protein (BiP) (Macejak et al. (1991) Nature 353:90-94); untranslated leader from the coat protein mRNA of alfalfa mosaic virus (AMV RNA 4) (Jobling et al. (1987) Nature 325:622-625); tobacco mosaic virus leader (TMV) (Gallie et al. (1989) in Molecular Biology of RNA, ed. Cech (Liss, New York), pp. 237-256); and maize chlorotic mottle virus leader (MCMV) (Lommel et al. (1991) Virology 81:382-385). See also, Della-Cioppa et al. (1987) Plant Physiol. 84:965-968.

[0184] In preparing the expression cassette, the various DNA fragments may be manipulated, so as to provide for the DNA sequences in the proper orientation and, as appropriate, in the proper reading frame. Toward this end, adapters or linkers may be employed to join the DNA fragments or other manipulations may be involved to provide for convenient restriction sites, removal of superfluous DNA, removal of restriction sites, or the like. For this purpose, in vitro mutagenesis, primer repair, restriction, annealing, resubstitutions, e.g., transitions and transversions, may be involved.

[0185] A number of promoters can be used in the practice of the invention. The promoters can be selected based on the desired outcome. The nucleic acids can be combined with constitutive, tissue-preferred, or other promoters for expression in plants. Such constitutive promoters include, for example, the core CaMV 35S promoter (Odell et al. (1985) Nature 313:810-812); rice actin (McElroy et al. (1990) Plant Cell 2:163-171); ubiquitin (Christensen et al. (1989) Plant Mol. Biol. 12:619-632 and Christensen et al. (1992) Plant Mol. Biol. 18:675-689); pEMU (Last et al. (1991) Theor. Appl. Genet. 81:581-588); MAS (Velten et al. (1984) EMBO J. 3:2723-2730); ALS promoter (U.S. Pat. No. 5,659,026), and the like. Other constitutive promoters include, for example, U.S. Pat. Nos. 5,608,149; 5,608,144; 5,604,121; 5,569,597; 5,466,785; 5,399,680; 5,268,463; 5,608,142; and 6,177,611.

[0186] Tissue-preferred promoters can be utilized to target enhanced expression of the modified R polynucleotide or AVR3a homolog polynucleotide within a particular plant tissue. Such tissue-preferred promoters include, but are not limited to, leaf-preferred promoters, root-preferred promoters, seed-preferred promoters, and stem-preferred promoters. Tissue-preferred promoters include Yamamoto et al. (1997) Plant J. 12(2):255-265; Kawamata et al. (1997) Plant Cell Physiol. 38(7):792-803; Hansen et al. (1997) Mol. Gen Genet. 254(3):337-343; Russell et al. (1997) Transgenic Res. 6(2):157-168; Rinehart et al. (1996) Plant Physiol. 112(3):1331-1341; Van Camp et al. (1996) Plant Physiol. 112(2):525-535; Canevascini et al. (1996) Plant Physiol. 112(2):513-524; Yamamoto et al. (1994) Plant Cell Physiol. 35(5):773-778; Lam (1994) Results Probl. Cell Differ. 20:181-196; Orozco et al. (1993) Plant Mol Biol. 23(6):1129-1138; Matsuoka et al. (1993) Proc Natl. Acad. Sci. USA 90(20):9586-9590; and Guevara-Garcia et al. (1993) Plant J. 4(3):495-505. Such promoters can be modified, if necessary, for weak expression.

[0187] Generally, it will be beneficial to express the gene from an inducible promoter, particularly from a pathogen-inducible promoter. Such promoters include those from pathogenesis-related proteins (PR proteins), which are induced following infection by a pathogen; e.g., PR proteins, SAR proteins, beta-1,3-glucanase, chitinase, etc. See, for example, Redolfi et al. (1983) Neth. J. Plant Pathol. 89:245-254; Uknes et al. (1992) Plant Cell 4:645-656; and Van Loon (1985) Plant Mol. Virol. 4:111-116. See also WO 99/43819, herein incorporated by reference.

[0188] Of interest are promoters that are expressed locally at or near the site of pathogen infection. See, for example, Marineau et al. (1987) Plant Mol. Biol. 9:335-342; Matton et al. (1989) Molecular Plant-Microbe Interactions 2:325-331; Somsisch et al. (1986) Proc. Natl. Acad. Sci. USA 83:2427-2430; Somsisch et al. (1988) Mol. Gen. Genet. 2:93-98; and Yang (1996) Proc. Natl. Acad. Sci. USA 93:14972-14977. See also, Chen et al. (1996) Plant J. 10:955-966; Zhang et al. (1994) Proc. Natl. Acad. Sci. USA 91:2507-2511; Warner et al. (1993) Plant J. 3:191-201; Siebertz et al. (1989) Plant Cell 1:961-968; U.S. Pat. No. 5,750,386 (nematode-inducible); and the references cited therein. Of particular interest is the inducible promoter for the maize PRms gene, whose expression is induced by the pathogen Fusarium moniliforme (see, for example, Cordero et al. (1992) Physiol. Mol. Plant. Path. 41:189-200).

[0189] Additionally, as pathogens find entry into plants through wounds or insect damage, a wound-inducible promoter may be used in the constructions of the invention. Such wound-inducible promoters include potato proteinase inhibitor (pin II) gene (Ryan (1990) Ann. Rev. Phytopath. 28:425-449; Duan et al. (1996) Nature Biotechnology 14:494-498); wun1 and wun2, U.S. Pat. No. 5,428,148; win1 and win2 (Stanford et al. (1989) Mol. Gen. Genet. 215:200-208); systemin (McGurl et al. (1992) Science 225:1570-1573); WIP1 (Rohmeier et al. (1993) Plant Mol. Biol. 22:783-792; Eckelkamp et al. (1993) FEBS Letters 323:73-76); MPI gene (Corderok et al. (1994) Plant J. 6(2):141-150); and the like, herein incorporated by reference.

[0190] Chemical-regulated promoters can be used to modulate the expression of a gene in a plant through the application of an exogenous chemical regulator. Depending upon the objective, the promoter may be a chemical-inducible promoter, where application of the chemical induces gene expression, or a chemical-repressible promoter, where application of the chemical represses gene expression. Chemical-inducible promoters are known in the art and include, but are not limited to, the maize In2-2 promoter, which is activated by benzenesulfonamide herbicide safeners, the maize GST promoter, which is activated by hydrophobic electrophilic compounds that are used as pre-emergent herbicides, and the tobacco PR-1a promoter, which is activated by salicylic acid. Other chemical-regulated promoters of interest include steroid-responsive promoters (see, for example, the glucocorticoid-inducible promoter in Schena et al. (1991) Proc. Natl. Acad. Sci. USA 88:10421-10425 and McNellis et al. (1998) Plant J. 14(2):247-257) and tetracycline-inducible and tetracycline-repressible promoters (see, for example, Gatz et al. (1991) Mol. Gen. Genet. 227:229-237, and U.S. Pat. Nos. 5,814,618 and 5,789,156), herein incorporated by reference.

[0191] The expression cassette can also comprise a selectable marker gene for the selection of transformed cells. Selectable marker genes are utilized for the selection of transformed cells or tissues. Marker genes include genes encoding antibiotic resistance, such as those encoding neomycin phosphotransferase II (NEO) and hygromycin phosphotransferase (HPT), as well as genes conferring resistance to herbicidal compounds, such as glufosinate ammonium, bromoxynil, imidazolinones, and 2,4-dichlorophenoxyacetate (2,4-D). Additional selectable markers include phenotypic markers such as β-galactosidase and fluorescent proteins such as green fluorescent protein (GFP) (Su et al. (2004) Biotechnol Bioeng 85:610-9 and Fetter et al. (2004) Plant Cell 16:215-28), cyan florescent protein (CYP) (Bolte et al. (2004) J. Cell Science 117:943-54 and Kato et al. (2002) Plant Physiol 129:913-42), and yellow florescent protein (PhiYFP™ from Evrogen, see, Bolte et al. (2004) J. Cell Science 117:943-54). For additional selectable markers, see generally, Yarranton (1992) Curr. Opin. Biotech. 3:506-511; Christopherson et al. (1992) Proc. Natl. Acad. Sci. USA 89:6314-6318; Yao et al. (1992) Cell 71:63-72; Reznikoff (1992) Mol. Microbiol. 6:2419-2422; Barkley et al. (1980) in The Operon, pp. 177-220; Hu et al. (1987) Cell 48:555-566; Brown et al. (1987) Cell 49:603-612; Figge et al. (1988) Cell 52:713-722; Deuschle et al. (1989) Proc. Natl. Acad. Aci. USA 86:5400-5404; Fuerst et al. (1989) Proc. Natl. Acad. Sci. USA 86:2549-2553; Deuschle et al. (1990) Science 248:480-483; Gossen (1993) Ph.D. Thesis, University of Heidelberg; Reines et al. (1993) Proc. Natl. Acad. Sci. USA 90:1917-1921; Labow et al. (1990) Mol. Cell. Biol. 10:3343-3356; Zambretti et al. (1992) Proc. Natl. Acad. Sci. USA 89:3952-3956; Bairn et al. (1991) Proc. Natl. Acad. Sci. USA 88:5072-5076; Wyborski et al. (1991) Nucleic Acids Res. 19:4647-4653; Hillenand-Wissman (1989) Topics Mol. Struc. Biol. 10:143-162; Degenkolb et al. (1991) Antimicrob. Agents Chemother. 35:1591-1595; Kleinschnidt et al. (1988) Biochemistry 27:1094-1104; Bonin (1993) Ph.D. Thesis, University of Heidelberg; Gossen et al. (1992) Proc. Natl. Acad. Sci. USA 89:5547-5551; Oliva et al. (1992) Antimicrob. Agents Chemother. 36:913-919; Hlavka et al. (1985) Handbook of Experimental Pharmacology, Vol. 78 (Springer-Verlag, Berlin); Gill et al. (1988) Nature 334:721-724. Such disclosures are herein incorporated by reference.

[0192] The above list of selectable marker genes is not meant to be limiting. Any selectable marker gene can be used in the present invention.

[0193] Numerous plant transformation vectors and methods for transforming plants are available. See, for example, An, G. et al. (1986) Plant Pysiol., 81:301-305; Fry, J., et al. (1987) Plant Cell Rep. 6:321-325; Block, M. (1988) Theor. Appl Genet. 76:767-774; Hinchee, et al. (1990) Stadler. Genet. Symp. 203212.203-212; Cousins, et al. (1991) Aust. J. Plant Physiol. 18:481-494; Chee, P. P. and Slightom, J. L. (1992) Gene. 118:255-260; Christou, et al. (1992) Trends. Biotechnol. 10:239-246; D'Halluin, et al. (1992) Bio/Technol. 10:309-314; Dhir, et al. (1992) Plant Physiol. 99:81-88; Casas et al. (1993) Proc. Nat. Acad Sci. USA 90:11212-11216; Christou, P. (1993) In Vitro Cell. Dev. Biol.-Plant; 29P:119-124; Davies, et al. (1993) Plant Cell Rep. 12:180-183; Dong, J. A. and Mchughen, A. (1993) Plant Sci. 91:139-148; Franklin, C. I. and Trieu, T. N. (1993) Plant. Physiol. 102:167; Golovkin, et al. (1993) Plant Sci. 90:41-52; Guo Chin Sci. Bull. 38:2072-2078; Asano, et al. (1994) Plant Cell Rep. 13; Ayeres N. M. and Park, W. D. (1994) Crit. Rev. Plant. Sci. 13:219-239; Barcelo, et al. (1994) Plant. J. 5:583-592; Becker, et al. (1994) Plant. J. 5:299-307; Borkowska et al. (1994) Acta. Physiol Plant. 16:225-230; Christou, P. (1994) Agro. Food. Ind. Hi Tech. 5: 17-27; Eapen et al. (1994) Plant Cell Rep. 13:582-586; Hartman, et al. (1994) Bio-Technology 12: 919923; Ritala, et al. (1994) Plant. Mol. Biol. 24:317-325; and Wan, Y. C. and Lemaux, P. G. (1994) Plant Physiol. 104:3748.

[0194] The methods of the invention involve introducing a polynucleotide construct into a plant. By “introducing” is intended presenting to the plant the polynucleotide construct in such a manner that the construct gains access to the interior of a cell of the plant. The methods of the invention do not depend on a particular method for introducing a polynucleotide construct to a plant, only that the polynucleotide construct gains access to the interior of at least one cell of the plant. Methods for introducing polynucleotide constructs into plants are known in the art including, but not limited to, stable transformation methods, transient transformation methods, and virus-mediated methods.

[0195] By “stable transformation” is intended that the polynucleotide construct introduced into a plant integrates into the genome of the plant and is capable of being inherited by progeny thereof. By “transient transformation” is intended that a polynucleotide construct introduced into a plant does not integrate into the genome of the plant.

[0196] For the transformation of plants and plant cells, the nucleotide sequences of the invention are inserted using standard techniques into any vector known in the art that is suitable for expression of the nucleotide sequences in a plant or plant cell. The selection of the vector depends on the preferred transformation technique and the target plant species to be transformed. In an embodiment of the invention, modified R polynucleotide is operably linked to a plant promoter that is known for high-level expression in a plant cell, and this construct is then introduced into a plant that is susceptible to an imidazolinone herbicide and a transformed plant is regenerated. The transformed plant is tolerant to exposure to a level of an imidazolinone herbicide that would kill or significantly injure an untransformed plant. This method can be applied to any plant species; however, it is most beneficial when applied to crop plants.

[0197] Methodologies for constructing plant expression cassettes and introducing foreign nucleic acids into plants are generally known in the art and have been previously described. For example, foreign DNA can be introduced into plants, using tumor-inducing (Ti) plasmid vectors. Other methods utilized for foreign DNA delivery involve the use of PEG mediated protoplast transformation, electroporation, microinjection whiskers, and biolistics or microprojectile bombardment for direct DNA uptake. Such methods are known in the art. (U.S. Pat. No. 5,405,765 to Vasil et al.; Bilang et al. (1991) Gene 100: 247-250; Scheid et al., (1991) Mol. Gen. Genet., 228: 104-112; Guerche et al., (1987) Plant Science 52: 111-116; Neuhause et al., (1987) Theor. Appl Genet. 75: 30-36; Klein et al., (1987) Nature 327: 70-73; Howell et al., (1980) Science 208:1265; Horsch et al., (1985) Science 227: 1229-1231; DeBlock et al., (1989) Plant Physiology 91: 694-701; Methods for Plant Molecular Biology (Weissbach and Weissbach, eds.) Academic Press, Inc. (1988) and Methods in Plant Molecular Biology (Schuler and Zielinski, eds.) Academic Press, Inc. (1989). The method of transformation depends upon the plant cell to be transformed, stability of vectors used, expression level of gene products and other parameters.

[0198] Other suitable methods of introducing nucleotide sequences into plant cells and subsequent insertion into the plant genome include microinjection as Crossway et al. (1986) Biotechniques 4:320-334, electroporation as described by Riggs et al. (1986) Proc. Natl. Acad. Sci. USA 83:5602-5606, Agrobacterium-mediated transformation as described by Townsend et al., U.S. Pat. No. 5,563,055, Zhao et al., U.S. Pat. No. 5,981,840, direct gene transfer as described by Paszkowski et al. (1984) EMBO J. 3:2717-2722, and ballistic particle acceleration as described in, for example, Sanford et al., U.S. Pat. No. 4,945,050; Tomes et al., U.S. Pat. No. 5,879,918; Tomes et al., U.S. Pat. No. 5,886,244; Bidney et al., U.S. Pat. No. 5,932,782; Tomes et al. (1995) “Direct DNA Transfer into Intact Plant Cells via Microprojectile Bombardment,” in Plant Cell, Tissue, and Organ Culture: Fundamental Methods, ed. Gamborg and Phillips (Springer-Verlag, Berlin); McCabe et al. (1988) Biotechnology 6:923-926); and Lec1 transformation (WO 00/28058). Also see, Weissinger et al. (1988) Ann. Rev. Genet. 22:421-477; Sanford et al. (1987) Particulate Science and Technology 5:27-37 (onion); Christou et al. (1988) Plant Physiol. 87:671-674 (soybean); McCabe et al. (1988) Bio/Technology 6:923-926 (soybean); Finer and McMullen (1991) In Vitro Cell Dev. Biol. 27P:175-182 (soybean); Singh et al. (1998) Theor. Appl. Genet. 96:319-324 (soybean); Datta et al. (1990) Biotechnology 8:736-740 (rice); Klein et al. (1988) Proc. Natl. Acad. Sci. USA 85:4305-4309 (maize); Klein et al. (1988) Biotechnology 6:559-563 (maize); Tomes, U.S. Pat. No. 5,240,855; Buising et al., U.S. Pat. Nos. 5,322,783 and 5,324,646; Tomes et al. (1995) “Direct DNA Transfer into Intact Plant Cells via Microprojectile Bombardment,” in Plant Cell, Tissue, and Organ Culture: Fundamental Methods, ed. Gamborg (Springer-Verlag, Berlin) (maize); Klein et al. (1988) Plant Physiol. 91:440-444 (maize); Fromm et al. (1990) Biotechnology 8:833-839 (maize); Hooykaas-Van Slogteren et al. (1984) Nature (London) 311:763-764; Bowen et al., U.S. Pat. No. 5,736,369 (cereals); Bytebier et al. (1987) Proc. Natl. Acad. Sci. USA 84:5345-5349 (Liliaceae); De Wet et al. (1985) in The Experimental Manipulation of Ovule Tissues, ed. Chapman et al. (Longman, New York), pp. 197-209 (pollen); Kaeppler et al. (1990) Plant Cell Reports 9:415-418 and Kaeppler et al. (1992) Theor. Appl. Genet. 84:560-566 (whisker-mediated transformation); D'Halluin et al. (1992) Plant Cell 4:1495-1505 (electroporation); Li et al. (1993) Plant Cell Reports 12:250-255 and Christou and Ford (1995) Annals of Botany 75:407-413 (rice); Osjoda et al. (1996) Nature Biotechnology 14:745-750 (maize via Agrobacterium tumefaciens); all of which are herein incorporated by reference.

[0199] The polynucleotides of the invention may be introduced into plants by contacting plants with a virus or viral nucleic acids. Generally, such methods involve incorporating a polynucleotide construct of the invention within a viral DNA or RNA molecule. It is recognized that the a modified R protein of the invention may be initially synthesized as part of a viral polyprotein, which later may be processed by proteolysis in vivo or in vitro to produce the desired recombinant protein. Further, it is recognized that promoters of the invention also encompass promoters utilized for transcription by viral RNA polymerases. Methods for introducing polynucleotide constructs into plants and expressing a protein encoded therein, involving viral DNA or RNA molecules, are known in the art. See, for example, U.S. Pat. Nos. 5,889,191, 5,889,190, 5,866,785, 5,589,367 and 5,316,931; herein incorporated by reference.

[0200] In specific embodiments, the modified R sequences or AVR3a homolog sequences of the invention can be provided to a plant using a variety of transient transformation methods. Such transient transformation methods include, but are not limited to, the introduction of the modified R protein or variants and fragments thereof, or AVR3a homolog proteins variants and fragments thereof, directly into the plant or the introduction of a modified R or AVR3a homolog transcript into the plant. Such methods include, for example, microinjection or particle bombardment. See, for example, Crossway et al. (1986) Mol Gen. Genet. 202:179-185; Nomura et al. (1986) Plant Sci. 44:53-58; Hepler et al. (1994) Proc. Natl. Acad. Sci. 91: 2176-2180 and Hush et al. (1994) The Journal of Cell Science 107:775-784, all of which are herein incorporated by reference. Alternatively, the polynucleotide can be transiently transformed into the plant using techniques known in the art. Such techniques include viral vector system and Agrobacterium tumefaciens-mediated transient expression as described below.

[0201] The cells that have been transformed may be grown into plants in accordance with conventional ways. See, for example, McCormick et al. (1986) Plant Cell Reports 5:81-84. These plants may then be grown, and either pollinated with the same transformed strain or different strains, and the resulting hybrid having constitutive expression of the desired phenotypic characteristic identified. Two or more generations may be grown to ensure that expression of the desired phenotypic characteristic is stably maintained and inherited and then seeds harvested to ensure expression of the desired phenotypic characteristic has been achieved. In this manner, the present invention provides transformed seed (also referred to as “transgenic seed”) having a polynucleotide construct of the invention, for example, an expression cassette of the invention, stably incorporated into their genome.

[0202] The present invention may be used for transformation of any plant species, including, but not limited to, monocots and dicots. Examples of plant species of interest include, but are not limited to, peppers (Capsicum spp; e.g., Capsicum annuum, C. baccatum, C. chinense, C. frutescens, C. pubescens, and the like), tomatoes (Lycopersicon esculentum), tobacco (Nicotiana tabacum), eggplant (Solanum melongena), petunia (Petunia spp., e.g., Petunia×hybrida or Petunia hybrida), corn or maize (Zea mays), Brassica sp. (e.g., B. napus, B. rapa, B. juncea), particularly those Brassica species useful as sources of seed oil, alfalfa (Medicago sativa), rice (Oryza sativa), rye (Secale cereale), sorghum (Sorghum bicolor, Sorghum vulgare), millet (e.g., pearl millet (Pennisetum glaucum), proso millet (Panicum miliaceum), foxtail millet (Setaria italica), finger millet (Eleusine coracana)), sunflower (Helianthus annuus), safflower (Carthamus tinctorius), wheat (Triticum aestivum), soybean (Glycine max), tobacco (Nicotiana tabacum), potato (Solanum tuberosum), peanuts (Arachis hypogaea), cotton (Gossypium barbadense, Gossypium hirsutum), sweet potato (Ipomoea batatus), cassava (Manihot esculenta), coffee (Coffea spp.), coconut (Cocos nucifera), pineapple (Ananas comosus), citrus trees (Citrus spp.), cocoa (Theobroma cacao), tea (Camellia sinensis), banana (Musa spp.), avocado (Persea americana), fig (Ficus casica), guava (Psidium guajava), mango (Mangifera indica), olive (Olea europaea), papaya (Carica papaya), cashew (Anacardium occidentale), macadamia (Macadamia integrifolia), almond (Prunus amygdalus), sugar beets (Beta vulgaris), sugarcane (Saccharum spp.), palms, oats, barley, vegetables, ornamentals, and conifers.

[0203] As used herein, the term plant includes plant cells, plant protoplasts, plant cell tissue cultures from which plants can be regenerated, plant calli, plant clumps, and plant cells that are intact in plants or parts of plants such as embryos, pollen, ovules, seeds, leaves, flowers, branches, fruits, roots, root tips, anthers, and the like. Progeny, variants, and mutants of the regenerated plants are also included within the scope of the invention, provided that these parts comprise the introduced polynucleotides. As used herein, “progeny” and “progeny plant” comprise any subsequent generation of a plant unless it is expressly stated otherwise or is apparent from the context of usage.

[0204] The invention is drawn to compositions and methods for enhancing the resistance of a plant to plant disease. By “disease resistance” is intended that the plants avoid the disease symptoms that are the outcome of plant-pathogen interactions. That is, pathogens are prevented from causing plant diseases and the associated disease symptoms, or alternatively, the disease symptoms caused by the pathogen is minimized or lessened.

[0205] The following examples are offered by way of illustration and not by way of limitation.

### EXAMPLES

### Example 1

### Modification of the R3a Resistance Protein to Extend Recognition to Effector Proteins Encoded by Virulent Alleles of Avr3a from Phytophthora infestans

[0206] Phytophthora infestans is one of the most devastating pathogens affecting potato production worldwide. One strategy to generate resistant cultivars is the introduction of resistance genes that are able to recognize P. infestans effector proteins with avirulence activities. R3a, a resistance protein discovered in potato, can trigger an hypersentive response upon the recognition of the avirulence effector AVR3a^{KI} from P. infestans but cannot recognize AVR3a^{EM}, the product of another allele that is predominant in pathogen populations. To date, all the characterized P. infestans strains in nature carry at least one of these AVR3a proteins.

### Materials and Methods

### Obtaining R3a Mutant Versions

[0207] The S. tuberosum R3a resistance gene (Huang et al. (2005) Plant J. 42: 251-261) was used as the template for a PCR-based random mutagenesis protocol (Diversify PCR Random Mutagenesis Kit, Clontech, Takara Bio Company) following the supplier's protocol. Primers were designed to amplify R3a including restriction enzymes recognition sites for the subcloning step (R3a_BamHI_Fw_MES: GGAGGATCCATGGAGATTGGCTTAGCAG, SEQ ID NO: 38 and R3a_SpeI_Rev_MES: GGAACTAGTTCACATGCATTCCCTATC, SEQ ID NO: 39). Different conditions were tested to generate various mutation rates. We selected those conditions that gave us a mutation rate ranging: between 1 and 2 mutations every 1000 bp (3-8 in a 4000 bp gene). The PCR reaction was purified using a QIAquick PCR Purification Kit (QIAGEN) and kept for later cloning steps.

### Generation of the Mutagenized R3a Library

[0208] PCR purified product (R3a mutagenized molecules; coding sequence only) and pCB302-3 binary vector (Xiang et al. (1999) Plant Mol. Biol. 40: 711-717) were digested with BamH I and Spe I restriction enzymes (Roche Applied Science). Digested PCR products and vector were gel-purified using the kit Wizard® SV Gel and PCR Clean-Up System (Promega), ligated and ligation mixture was transformed into electro competent A. tumefaciens GV3101 cells to make a library “ready-to-use” in screening assays with the R3a mutagenized molecules under the control of the CaMV 35S promoter. The transformation efficiency was >5500 ufcs/ml, with more than 75% of positive clones. The colonies were picked out using a QPix colony-picking robot (Genetix, New Milton, U.K.) into 384 wells plates for preparation of freezer stocks. The library, containing more than 6000 clones (19 plates of 384 wells each), was kept at −80° C.

### Screening of the Library

[0209] The screening was performed using the agroinfiltration transient assay in Nicotiana benthamiana (Van der Hoorn et al. (2000) Mol. Plant-Microbe Interact. 13:439-446; Bos et al. (2006) Plant J. 48:165-176; Bos et al. (2009) Mol. Plant-Microbe Interact. 22: 269-281). 96 wells 2 ml-deph plates containing 500 μl of LB media with antibiotics (rifampicin 50 mg/L, gentamicin 20 mg/L and kanamicin 50 mg/L) were inoculated with the library clones and grew at low speed and 28° C. for 48 hrs (to reach an OD600 of 1-1,2). Cultures were pelleted by centrifugation (5 min at 3500 rpm and 15° C.) and resuspended with infiltration buffer (1 L MMA: 5 g MS salts, 1.95 g MES, 20 g sucrose, 200 μM acetosyringone, pH 5.6) to a final OD600 of 0.6. A. tumefaciens GV3101 transformed with pGR106-AVR3a_K80I103 and pRG106-AVR3a_E80M103 (Armstrong et al. (2005) PNAS 102:7766-7771) were grown for agroinfiltration as previously described (Van der Hoorn et al. (2000) Mol. Plant-Microbe Interact. 13:439-446), except that the culturing steps were performed in LB media supplemented with rifampicin 50 mg/L, gentamicin 20 mg/L and kanamicin 50 mg/L. Cultures were pelleted and resuspended in infiltration buffer as described above. For transient co-expression of R3a, R3a mutated clones and AVR3a, the cells resuspended in infiltration buffer were mixed to have a final OD600=0.3 or 0.15 for R3a clones and AVR3a clones respectively. A. tumefaciens GV3101 transformed with pGR106-ΔGFP (it contains a truncated version of gfp) was grew as the AVR3a clones. Agroinfiltration experiments were performed on 4 to 6-week-old N. benthamiana plants. Plants were grown and maintained throughout the experiments in a controlled environment room with an ambient temperature of 22 to 25° C. and high light intensity. Symptom development was monitored from 3 to 8 days after infiltration (d.p.i.). Each R3a mutant clone was co-infiltrated with Avr3a^{EM} for gain of function assessment. Interesting clones were co-infiltrated with Avr3a^{KI} for loss of function assessment. After the first round of screening, the clones that gave a positive response with AVR3a^{EM} were selected for a new round of agroinfiltration to confirm the previous observations and to rule out auto activation. The strategy that was used is summarized in FIG. 1.

### Validation of the Candidate Clones

[0210] The positive clones selected after the first round of infiltrations were infiltrated again with Avr3a^{EM} or a control vector (pGR106-ΔGFP) to rule out auto activation. After the first round of screening (2200 clones) and validation, 19 clones that showed a clear response to AVR3a^{EM} but not with the control vector were selected for further analysis.

### R3a Mutant Clones Characterization: Comparative Effector Recognition

[0211] The selected clones were co-infiltrated in N. benthamiana leaves to compare their relative response when AVR3aEM, AVR3aKI or AGFP are present. Co infiltrations were performed as mentioned above. Each combination of R3a mutant-clone and AVR3a (or Δgfp) was infiltrated as 10 to 12 replicates each. HR-like phenotype was scored in a daily basis up to 8 d.p.i., according to an arbitrary scale from 0 (no phenotype observed) to 10 (confluent necrosis). Results are summarized in FIG. 2.

### R3a Mutant Clone Characterization—Sequence Analysis of the Candidate Clones

[0212] Plasmid DNA from 17 of the candidate clones was isolated and R3a inserts were sequenced using several primers to allow full coverage. The analysis of the sequences allowed the identification of several mutations in each clone.

### R3a Mutant Clones Characterization—Differential Contribution of the Mutations to the Observed HR-Like Phenotype

[0213] To assess if particular mutations out of all the mutations present in each clone are responsible for the extended recognition specificity, we made chimerical clones between R3a wt and clone 1B/A10 by overlapping PCR (FIG. 4). After amplification, PCR products were digested with BamH I and Spe I restriction enzymes, gel purified and ligated into pCB302-3 binary vector as already described but with the chimerical clones operably linked to a the constitutive Rip.vnt1.1 promoter (SEQ ID NO: 40; Foster et al. (2009) MPMI 22:589-600) and the Rip.vnt1.1 terminator (SEQ ID NO: 41; Foster et al. (2009) MPMI 22:589-600). The result were two clones, named NT* and CT*. NT* contains the four amino acid substitutions in the CC and NBS domains of 1B/A10, while CT* contains only one amino acid substitution in the LRR domain. The nucleotide and amino acid sequences of CT* are set forth in SEQ ID NOS: 52 and 53, respectively. These two clones were transformed into A. tumefaciens GV3101 electrocompetent cells for agroinfiltration experiments. Clones 1B/A10, NT*, CT* and R3a wt (all having pCB302-3 as the backbone vector) were co-infiltrated with pGR106-Avr3aKI, pGR106-Avr3aEM or pGR106-ΔGFP using the same methodology already explained.

### Results

[0214] To attempt to extend R3a recognition specificity to AVR3a^{EM}, a library of R3a mutant variants was produced by random mutagenesis. The mutated nucleic acid molecules were cloned in a T-DNA binary vector and transformed into Agrobacterium tumefaciens. The mutant clones were screened by co-agroinfiltration with AVR3a^{EM} in Nicotiana benthamiana plants, and evaluated the presence of HR-like phenotypes after 5 days.

[0215] Of approximately 2200 evaluated clones, 20 triggered different degrees of HR-like responses and were subjected to new rounds of infiltrations to confirm the results. In parallel, the candidate clones were co-infiltrated with AVR3a^{KI} and with a negative control plasmid to investigate the conservation of the original R3a recognition specificity and also to eliminate auto-active R3a mutants. In total, 17 clones were selected for further analyses, including sequencing and the construction of chimerical clones to investigate which mutations are responsible for the observed phenotypes.

[0216] As observed in FIG. 2, the 19 clones showing a response to AVR3a^{EM} show a different degree of HR-like phenotype, but in all the cases, it was higher than the response observed with the wild-type R3a resistance protein. Moreover, all the clones showed recognition specificity for AVR3a^{KI}, and in a few cases, a minor response was observed against the Δgfp construct. In the analyzed cases, mutations selected extended the recognition specificity of the mutated R3a clones towards AVR3a^{EM} without affecting the original recognition of AVR3a^{KI}, and without triggering auto-activation of R3a.

[0217] Sequences from the mutant R3a clones capable of recognizing AVR3a^{EM} were obtained and mutations compared to wild type R3a identified. Many of the mutations were at positions giving rise to amino acid changes. The relative position of the mutations in each clone and the mutations itself are summarized in FIG. 3.

[0218] As observed in FIG. 4, only the mutation in the LRR domain is the one that confers to clone 1B/A10 the new recognition specificity towards AVR3a^{EM}. Moreover, when only this amino acid change is present (E941K), the HR response is stronger than the one observed with the original clone. Interesting mutations seem to be located in the LRR domain, as observed with the chimerical clone CT* and also with clone 6C/C10 (K920E). The nucleotide and amino acid sequences of 6C/C10 are set forth in SEQ ID NOS: 31 and 32, respectively. These results indicate that individual amino acid changes can confer R3a an extended recognition specificity, and also that mutations with negative impact on AVR3aEM recognition could be depurated from the candidate clones, as shown for clone 1B/A10.

[0219] In addition, several other single amino acid substitutions in the LRR domain of R3a have been shown to confer recognition specificity towards AVR3a^{EM} on R3a. (FIG. 5). These amino acid substitutions include, for example, L668P, C950R, E983K, and K1250R (Table 1).

TABLE 1
Additional Single Amino Acid Substitutions
that Confer Recognition of AVR3a^{EM} on R3a

| | Amino acid | Amino Acid | Nucleotide |
|---|---|---|---|
| Clone ID | change | Sequence | Sequence |
| GS4 | L668P | SEQ ID NO: 43 | SEQ ID NO: 42 |
| GS8 | C950R | SEQ ID NO: 45 | SEQ ID NO: 44 |
| GS12 | E983K | SEQ ID NO: 49 | SEQ ID NO: 48 |
| GS15 | K1250R | SEQ ID NO: 51 | SEQ ID NO: 50 |

### Example 2

### Modified R3a Proteins Recognized AVR3a Homologs in Other Phytophthora Species

[0220] AVR3a is polymorphic and homologs are present in at least three Phytophthora species, P. infestans, P. capsici and P. sojae. AVR3a homologs from P. capsici and P. sojae were cloned, and their ability to trigger R3a-mediated HR and suppression of INF-1 induced cell death was assessed (Bos (2007) “Function and evolution of the RxLR effector AVR3a of Phytophthora infestans”, Ph.D. Dissertation, The Ohio State University). Most homologs did not display AVR3a-like effector activity, except the homologs from P. infestans PEX147-3 (PiPEX147-3) and P. sojae AVH1b (PsAVH1b), both of which were able to induce a HR upon co-expression in N. benthamiana.

[0221] Co-infiltration experiments in N. benthamiana were conducted essentially as described in Example 1 to investigate if modified R3a+ proteins of the present invention could recognize not only AVR3a^{EM} from P. infestans but also one or more AVR3a homologs from other Phytophthora species (FIGS. 6-7). The results of these experiments revealed that 6D/A1 and 6D/E6 recognize P. capsici AVR3a11 (PcAVR3a11) and 6D/A1, 6D/E6, and 4D/B3 showed enhanced recognition towards AVR1b from P. sojae (PsAVR1b) (FIG. 6). Moreover, CT* with a single amino acid substitution (E941K) showed the new recognition specificity for PsAVR1b (FIG. 7). All of the tested clones recognized PiPEX147-3 and PsAVH1b in a similar way as the wild-type R3a protein. For PcAVR3a4, most of the clones behaved like the wild-type R3a protein except for 2A/B5 and 6C/C10 (FIG. 6). The hypersentive response triggered by PcAVR3a4 when co-infiltrated with these clones was reduced when compared to the hypersentive response with the wild-type R3a protein.

[0222] In summary, some modified R3a proteins of the present invention have expanded recognition specificity and can also recognize AVR3a homologs from other Phytophthora species.

### Example 3

### Modified R3a Protein GS4 Triggers a Stronger Hypersensitive Response in the Presence of PiAVR3a^{KI} than Wild-Type R3a

[0223] Several R3a modified clones (GS4, 8, 12 and 15; 6C/C10 and Ch7) or the wt R3a clone (all cloned in the pCBNptII_PTvnt1.1 backbone) were co-infiltrated side-by-side with serial dilutions of PiAVR3aKI (pK7 backbone) in N. benthamiana leaves essentially as described in Example 1. An empty vector (EV) clone was included as a control. The phenotype (HR) was scored in one of three categories at 4 d.p.i. for neighboring spots one the same leaf (i.e., modified R3a and wt R3a in opposite sides of the leaf) as follows: (1) modified R3a stronger than R3a, (2) modified R3a equal to R3a, or (3) modified R3a weaker than R3a.

[0224] The results for the lowest concentration of PiAVR3aKI are plotted as percentage of compared spots showing each of the possible outcomes in FIG. 8A. GS4 gave a stronger HR for approximately 60% of the infiltrated spots, suggesting that the modified R3a protein encoded by this clone not only has expanded recognition specificity towards PiAVR3a^{EM} and AVR3a family members for other Phythophthora species but is also more sensitive for PiAVR3a^{KI} allele recognition, when compared to the wild-type R3a protein. A representative picture is included (FIG. 8B).

### Example 4

### Co-Expression of Modified R3a Proteins with Wild-Type R3a Protein

[0225] The GS4 and GS12 clones, each of which encodes a modified R3a protein, were separately co-infiltrated into N. benthamiana leaves with a clone encoding R3a (wild-type) and a clone encoding AVR3a^{EM}. The co-infiltrations were conducted essentially as described in Example 1, and HR was evaluated at 2.5, 3.5, 4.5, and 5.5 d.p.i.

[0226] The results for GS4 and G12 are shown in FIGS. 9 and 10, respectively. Relative to the co-infiltration of GS4, empty vector (e.v.), and PiAVR3a^{EM}, HR was delayed when R3a, GS4, and PiAVR3a^{EM} were co-infiltrated together (FIG. 9). Similar results were obtained with GS12 (FIG. 10). While the present invention does not depend on a particular biological mechanism, it is recognized that the results shown in FIGS. 9 and 10 suggest that the R3a protein may act in vivo as a dimer.

### Example 5

### A Modified R3a Protein Triggers a Hypersensitive Response in the Presence of AVR3a Homologs from Phytophthora palmivora in Leaves from Both Solanaceous and Non-Solanaceous Plants

[0227] Biotrophic pathogens specialize on a few related host plants. However, Phytophthora palmivora, a ubiquitous tropical fungal-like oomycete can infect more than 200 host species and is a threat for chocolate producing countries because it causes pod rot on cocoa (Theobroma cacao). Characterised plant disease resistance proteins only confer resistance to specific pathogens by targeted recognition of single effector proteins. However, Phytophthora effectors evolved to overcome plant perception.

[0228] To obtain target effectors for known resistance genes an aggressive strain of Phytophthora palmivora from Colombia was sequenced and used for assembly and blast analysis against known avirulence genes. Five different candidates with homology to AVR3a of P. infestans were identified. Degenerate primers were used to amplify a full set of paralogs from the genome and 15 different AVR3a variants harbouring 9 different effector domains were identified.

[0229] To test whether the previously characterised R3a protein could be adapted to recognise a wider spectrum of AVR3a-related effectors, including Phytophthora palmivora AVR3a variants, an R3a mutant library was screened for variants with extended specificity and the modified R3a protein of clone GS4 was identified. Nine different Phytophthora palmivora AVR3a effector domains were tested with the GS4 R3a protein in co-infiltration assays in N. benthamiana essentially as described in Example 1. Seven different Phytophthora palmivora AVR3a homologs were found to trigger a hypersensitive response with GS4 R3a protein (Table 2). Generally, the GS4 R3a protein seems to enhance timing and intensity of HR development. Furthermore, it was determined that the GS4 R3a protein confers recognition of variants L3B and L3C which were unrecognized by the native R3a protein confirming GS4 R3a protein's increased potential for AVR3a effector family recognition.

TABLE 2
Cell Death/HR Intensity Upon Coexpression of P. palmivora
AVR3a Homologs with Different R3a Variants,

| | | pVnt1-R3a | | | pBIN::35S-R3a | | | pVnt1-R3aGS4 | | | |
|---|---|---|---|---|---|---|---|---|---|---|---|
| Variant | ev | 1dpi | 2dpi | 3dpi | 1dpi | 2dpi | 3dpi | 1dpi | 2dpi | 3dpi | |
| L2A | 0 | 2 | 3 | 4 | 2 | 2 | 3 | 2 | 4 | 4 | |
| L3B | 0 | 0 | 0 | 0 | 0 | 1 | 2 | 0 | 2 | 3 | * |
| L3C | 0 | 0 | 0 | 0 | 0 | 0 | 0 | 2 | 3 | 3 | ** |
| L4A | 0 | 0 | 1 | 2 | 0 | 1 | 2 | 0 | 1 | 2 | |
| L5A | 0 | 0 | 1 | 3 | 0 | 1 | 3 | 2 | 3 | 4 | |
| L6B | 0 | 0 | 0 | 0 | 0 | 0 | 0 | 0 | 0 | 0 | |
| L7A | 0 | 0 | 0 | 1 | 0 | 0 | 1 | 0 | 0 | 2 | |
| L7B | 0 | 0 | 1 | 1 | 0 | 1 | 1 | 2 | 2 | 2 | |
| L7C | 0 | 0 | 0 | 0 | 0 | 0 | 0 | 0 | 0 | 0 | |
| AVR3a^{KI} | 0 | 2 | 3 | 4 | 1 | 1 | 2 | 2 | 4 | 4 | |

Asterisks indicate significant gain in recognition only upon use of the GS4 R3a protein.

[0230] Tests were conducted to determine whether the GS4 R3a protein can limit P. palmivora infection in N. benthamiana. The GS4 R3a protein was found to effectively block infection of two different P. palmivora isolates suggesting that both isolates carry AVR3a homologs (Table 3).

TABLE 3
Infection Assays of P. palmivora and P. infestans
on N. benthamiana Transgenic for Expression of the
Wild-Type R3a Protein or the GS4 Modified R3a Protein

| | | | P. infestans |
|---|---|---|---|
| Construct | Agro AVR3aKI | P. palmivora | T30/4 (TD) |
| Pvnt-R3aGS4 #1 | all strong HR | sign. Reduced | not infected |
| Pvnt-R3aGS4 #4 | all strong HR | sign. Reduced | not infected |
| Vector #4 | all no HR | all infected | all infected |
| Vector #10 | all no HR | all infected | all infected |
| 35S-R3a WT | strong HR | reduced/not inf. | (Not tested) |

[0231] AVR3a homologs were amplified from the second isolate and identified 12 different variants. The amino acid sequences of the AVR3a homologs from the two different isolates of Phytophthora palmivora (L=16830, AJ=6390) are set forth in SEQ ID NOS: 54-84.

[0232] To transfer R3a to other hosts it is crucial that its function is not limited to potato or related Solanaceous plants. Agrobacterium transient expression was used to test its ability to mediate AVR3a recognition in taxonomically unrelated species essentially as described in Example 1. It was determined that HR induction is maintained in lamb's lettuce (Valerianella locusta) and spinach (Spinacia oleracea), suggesting applicability of R3a in unrelated non-Solanaceous host plants as shown in FIGS. 11-12.

[0233] The results described in this example provide a framework for genome-aided identification of Phytophthora effector proteins and development of extended specificity disease resistance proteins. A variant of the R3a disease resistance protein (GS4) was produced and determined to have the ability to confer resistance towards isolates of P. palmivora thru recognition of an extended set of multiple AVR3a-like effectors.

[0234] The article “a” and “an” are used herein to refer to one or more than one (i.e., to at least one) of the grammatical object of the article. By way of example, “an element” means one or more element.

[0235] Throughout the specification the word “comprising,” or variations such as “comprises” or “comprising,” will be understood to imply the inclusion of a stated element, integer or step, or group of elements, integers or steps, but not the exclusion of any other element, integer or step, or group of elements, integers or steps.

[0236] All publications and patent applications mentioned in the specification are indicative of the level of those skilled in the art to which this invention pertains. All publications and patent applications are herein incorporated by reference to the same extent as if each individual publication or patent application was specifically and individually indicated to be incorporated by reference.

[0237] Although the foregoing invention has been described in some detail by way of illustration and example for purposes of clarity of understanding, it will be obvious that certain changes and modifications may be practiced within the scope of the appended claims.

1. A nucleic acid molecule comprising a nucleotide sequence selected from the group consisting of:
(a) a nucleotide sequence encoding a modified R3a protein that is capable of inducing a hypersensitive response in a plant in the presence of AVR3a^{EM};
(b) a nucleotide sequence encoding a modified R3a protein that is capable of inducing a hypersensitive response in a plant in the presence of AVR3a^{EM} and that is capable of inducing a hypersensitive response in a plant in the presence of AVR3a^{KI};
(c) the nucleotide sequence set forth in SEQ ID NO: 3, 5, 7, 9, 11, 13, 15, 17, 19, 21, 23, 25, 27, 29, 31, 33, 35, 42, 44, 46, 48, 50, or 52;
(d) a nucleotide sequence encoding the amino acid sequence set forth in SEQ ID NO: 4, 6, 8, 10, 12, 14, 16, 18, 20, 22, 24, 26, 28, 30, 32, 34, 36, 43, 45, 47, 49, 51, or 53;
(e) a nucleotide sequence comprising at least 85% nucleotide sequence identity to at least one nucleotide sequence selected from the group consisting of SEQ ID NOS: 3, 5, 7, 9, 11, 13, 15, 17, 19, 21, 23, 25, 27, 29, 31, 33, 35, 42, 44, 46, 48, 50, and 52, wherein said nucleotide molecule encodes a protein comprising HR activity in a plant in the presence of AVR3a^{EM};
(f) a nucleotide sequence encoding an amino acid sequence comprising at least 85% amino acid sequence identity to at least one amino acid sequence selected from the group consisting of SEQ ID NOS: 4, 6, 8, 10, 12, 14, 16, 18, 20, 22, 24, 26, 28, 30, 32, 34, 36, 43, 45, 47, 49, 51, and 53, wherein said nucleotide molecule encodes a protein comprising HR activity in a plant in the presence of AVR3a^{EM};
(g) a nucleotide sequence encoding an amino acid sequence comprising at least 85% amino acid sequence identity to at least one amino acid sequence selected from the group consisting of SEQ ID NOS: 4, 6, 8, 10, 12, 14, 16, 18, 20, 22, 24, 26, 28, 30, 32, 34, 36, 43, 45, 47, 49, 51, and 53, wherein said nucleotide molecule encodes a protein comprising HR activity in a plant in the presence of AVR3a^{EM}, and wherein the amino acid sequence comprises at least one of the amino acid substitutions as set forth in FIG. 3;
(h) a nucleotide sequence encoding an amino acid sequence comprising at least 85% amino acid sequence identity to at least one amino acid sequence selected from the group consisting of SEQ ID NOS: 4, 6, 8, 10, 12, 14, 16, 18, 20, 22, 24, 26, 28, 30, 32, 34, 36, 43, 45, 47, 49, 51, and 53, wherein said nucleotide molecule encodes a protein comprising HR activity in a plant in the presence of AVR3a^{EM}, and wherein the amino acid sequence comprises at least one of the amino acid substitutions in the LRR domain as set forth in FIG. 3;
(i) a fragment of the nucleotide sequence of any one of (a)-(h), wherein said fragment encodes a protein comprising HR activity in a plant in the presence of AVR3a^{EM};
(j) the nucleotide sequence of any one of (e)-(i), wherein said protein further comprises HR activity in a plant in the presence of AVR3a^{KI}; and
(k) a nucleotide sequence that is fully complementary to the nucleotide sequence of any one of (a)-(j).

2. An expression cassette comprising the nucleic acid molecule of claim 1 operably linked to a promoter.

3. A non-human host cell comprising the expression cassette of claim 2.

4. A plant or plant cell comprising the expression cassette of claim 2.

5. A plant comprising in its genome a heterologous polynucleotide, said heterologous polynucleotide comprising a nucleotide sequence encoding a modified R3a protein and an operably linked to promoter capable of driving expression of said nucleotide sequence in a plant, wherein said modified R3a protein is capable of inducing a hypersensitive response in a plant in the presence of AVR3a^{EM} and optionally is capable of inducing a hypersensitive response in a plant in the presence of AVR3a^{KI}.

6. The plant of claim 5, wherein said nucleotide sequence comprises a nucleotide sequence selected from the group consisting of:
(a) the nucleotide sequence set forth in SEQ ID NO: 3, 5, 7, 9, 11, 13, 15, 17, 19, 21, 23, 25, 27, 29, 31, 33, 35, 42, 44, 46, 48, 50, or 52;
(b) a nucleotide sequence encoding the amino acid sequence set forth in SEQ ID NO: 4, 6, 8, 10, 12, 14, 16, 18, 20, 22, 24, 26, 28, 30, 32, 34, 36, 43, 45, 47, 49, 51, or 53;
(c) a nucleotide sequence comprising at least 85% nucleotide sequence identity to at least one nucleotide sequence selected from the group consisting of SEQ ID NOS: 3, 5, 7, 9, 11, 13, 15, 17, 19, 21, 23, 25, 27, 29, 31, 33, 35, 42, 44, 46, 48, 50, and 53, wherein said nucleotide molecule encodes a protein comprising HR activity in a plant in the presence of AVR3a^{EM};
(d) a nucleotide sequence encoding an amino acid sequence comprising at least 85% amino acid sequence identity to at least one amino acid sequence selected from the group consisting of SEQ ID NOS: 4, 6, 8, 10, 12, 14, 16, 18, 20, 22, 24, 26, 28, 30, 32, 34, 36, 43, 45, 47, 49, 51, and 53, wherein said nucleotide molecule encodes a protein comprising HR activity in a plant in the presence of AVR3a^{EM};
(e) a nucleotide sequence encoding an amino acid sequence comprising at least 85% amino acid sequence identity to at least one amino acid sequence selected from the group consisting of SEQ ID NOS: 4, 6, 8, 10, 12, 14, 16, 18, 20, 22, 24, 26, 28, 30, 32, 34, 36, 43, 45, 47, 49, 51, and 53, wherein said nucleotide molecule encodes a protein comprising HR activity in a plant in the presence of AVR3a^{EM}, and wherein the amino acid sequence comprises at least one of the amino acid substitutions as set forth in FIG. 3;
(f) a nucleotide sequence encoding an amino acid sequence comprising at least 85% amino acid sequence identity to at least one amino acid sequence selected from the group consisting of SEQ ID NOS: 4, 6, 8, 10, 12, 14, 16, 18, 20, 22, 24, 26, 28, 30, 32, 34, 36, 43, 45, 47, 49, 51, and 53, wherein said nucleotide molecule encodes a protein comprising HR activity in a plant in the presence of AVR3a^{EM}, and wherein the amino acid sequence comprises at least one of the amino acid substitutions in the LRR domain as set forth in FIG. 3; and
(g) a fragment of the nucleotide sequence of any one of (a)-(f), wherein said fragment encodes a protein comprising HR activity in a plant in the presence of AVR3a^{EM}.

7. The plant of claim 5, wherein the promoter is selected from the group consisting of a constitutive promoters, wound-inducible promoters, pathogen-inducible promoters, chemical-regulated promoters, chemical-inducible promoters, and tissue-preferred promoters.

8. The plant of claim 5, wherein the plant is selected from the group consisting of potato, tomato, eggplant, petunia, Physalis sp., woody nightshade, garden huckleberry, gboma eggplant, Ageratum conyzoides, Solanecio biafrae, peppers, soybean, cocoa, and palms.

9. The plant of claim 5, wherein said plant is a seed.

10. A plant part of the plant of claim 5.

11. The plant part of claim 10, wherein said part is a tuber, a seed, or a fruit.

12. A method for enhancing the resistance of a plant to at least one Phytophthora species, said method comprising transforming a plant cell with a polynucleotide comprising a nucleotide sequence encoding a modified R3a protein, wherein said modified R3a protein is capable of inducing a hypersensitive response in a plant in the presence of AVR3a^{EM} and optionally is capable of inducing a hypersensitive response in a plant in the presence of AVR3a^{KI}.

13. The method of claim 12, wherein the Phytophthora species is selected from the group consisting of P. infestans, P. sojae, P. capsici, and P. palmivora.

14. The method of claim 12, wherein said nucleotide sequence comprises a nucleotide sequence selected from the group consisting of:
(a) the nucleotide sequence set forth in SEQ ID NO: 3, 5, 7, 9, 11, 13, 15, 17, 19, 21, 23, 25, 27, 29, 31, 33, 35, 42, 44, 46, 48, 50, or 52;
(b) a nucleotide sequence encoding the amino acid sequence set forth in SEQ ID NO: 4, 6, 8, 10, 12, 14, 16, 18, 20, 22, 24, 26, 28, 30, 32, 34, 36, 43, 45, 47, 49, 51, or 53;
(c) a nucleotide sequence comprising at least 85% nucleotide sequence identity to at least one nucleotide sequence selected from the group consisting of SEQ ID NOS: 3, 5, 7, 9, 11, 13, 15, 17, 19, 21, 23, 25, 27, 29, 31, 33, 35, 42, 44, 46, 48, 50, and 52, wherein said nucleotide molecule encodes a protein comprising HR activity in a plant in the presence of AVR3a^{EM};
(d) a nucleotide sequence encoding an amino acid sequence comprising at least 85% amino acid sequence identity to at least one amino acid sequence selected from the group consisting of SEQ ID NOS: 4, 6, 8, 10, 12, 14, 16, 18, 20, 22, 24, 26, 28, 30, 32, 34, 36, 43, 45, 47, 49, 51, and 53, wherein said nucleotide molecule encodes a protein comprising HR activity in a plant in the presence of AVR3a^{EM};
(e) a nucleotide sequence encoding an amino acid sequence comprising at least 85% amino acid sequence identity to at least one amino acid sequence selected from the group consisting of SEQ ID NOS: 4, 6, 8, 10, 12, 14, 16, 18, 20, 22, 24, 26, 28, 30, 32, 34, 36, 43, 45, 47, 49, 51, and 53, wherein said nucleotide molecule encodes a protein comprising HR activity in a plant in the presence of AVR3a^{EM}, and wherein the amino acid sequence comprises at least one of the amino acid substitutions as set forth in FIG. 3;
(f) a nucleotide sequence encoding an amino acid sequence comprising at least 85% amino acid sequence identity to at least one amino acid sequence selected from the group consisting of SEQ ID NOS: 4, 6, 8, 10, 12, 14, 16, 18, 20, 22, 24, 26, 28, 30, 32, 34, 36, 43, 45, 47, 49, 51, and 53, wherein said nucleotide molecule encodes a protein comprising HR activity in a plant in the presence of AVR3a^{EM}, and wherein the amino acid sequence comprises at least one of the amino acid substitutions in the LRR domain as set forth in FIG. 3; and
(g) a fragment of the nucleotide sequence of any one of (a)-(f), wherein said fragment encodes a protein comprising HR activity in a plant in the presence of AVR3a^{EM}.

15. The method of claim 12, wherein the plant comprises enhanced resistance to Phytophthora infestans strains comprising AVR3a^{EM} and optionally comprises enhanced resistance to Phytophthora infestans strains comprising AVR3a^{KI}.

16. The method of claim 12, wherein the plant is selected from the group consisting of potato, tomato, eggplant, petunia, Physalis sp., woody nightshade, garden huckleberry, gboma eggplant, Ageratum conyzoides, Solanecio biafrae, peppers, soybean, cocoa, and palms.

17. The method of claim 12, wherein the polynucleotide further comprises an operably linked promoter capable of driving expression of said nucleotide sequence in a plant.

18. The method of claim 12, further comprising regenerating a transformed plant from said transformed cell.

19. A plant or plant cell produced by the method of claim 12.

20. A method for enhancing the resistance of a potato plant to Phytophthora infestans, said method comprising altering the coding sequence of the R3a gene in a plant or plant cell, whereby the altered coding sequence encodes a modified R3a protein that comprises an amino acid sequence having at least one amino acid substitution relative to the amino acid sequence of the R3a protein encoded by the R3a gene, wherein said modified R3a protein is capable of inducing a hypersensitive response in a plant in the presence of AVR3a^{EM} and optionally is capable of inducing a hypersensitive response in a plant in the presence of AVR3a^{KI}.

21. The method of claim 20, wherein altering the coding sequence of the R3a gene in a plant comprises in vivo targeted mutagenesis, homologous recombination, or mutation breeding.

22. The method of claim 20, wherein said altered coding sequence comprises a nucleotide sequence selected from the group consisting of:
(a) the nucleotide sequence set forth in SEQ ID NO: 3, 5, 7, 9, 11, 13, 15, 17, 19, 21, 23, 25, 27, 29, 31, 33, 35, 42, 44, 46, 48, 50, or 52;
(b) a nucleotide sequence encoding the amino acid sequence set forth in SEQ ID NO: 4, 6, 8, 10, 12, 14, 16, 18, 20, 22, 24, 26, 28, 30, 32, 34, 36, 43, 45, 47, 49, 51, or 53;
(c) a nucleotide sequence comprising at least 85% nucleotide sequence identity to at least one nucleotide sequence selected from the group consisting of SEQ ID NOS: 3, 5, 7, 9, 11, 13, 15, 17, 19, 21, 23, 25, 27, 29, 31, 33, 35, 42, 44, 46, 48, 50, and 52, wherein said nucleotide molecule encodes a protein comprising HR activity in a plant in the presence of AVR3a^{EM};
(d) a nucleotide sequence encoding an amino acid sequence comprising at least 85% amino acid sequence identity to at least one amino acid sequence selected from the group consisting of SEQ ID NOS: 4, 6, 8, 10, 12, 14, 16, 18, 20, 22, 24, 26, 28, 30, 32, 34, 36, 43, 45, 47, 49, 51, and 53, wherein said nucleotide molecule encodes a protein comprising HR activity in a plant in the presence of AVR3a^{EM};
(e) a nucleotide sequence encoding an amino acid sequence comprising at least 85% amino acid sequence identity to at least one amino acid sequence selected from the group consisting of SEQ ID NOS: 4, 6, 8, 10, 12, 14, 16, 18, 20, 22, 24, 26, 28, 30, 32, 34, 36, 43, 45, 47, 49, 51, and 53, wherein said nucleotide molecule encodes a protein comprising HR activity in a plant in the presence of AVR3a^{EM}, and wherein the amino acid sequence comprises at least one of the amino acid substitutions as set forth in FIG. 3;
(f) a nucleotide sequence encoding an amino acid sequence comprising at least 85% amino acid sequence identity to at least one amino acid sequence selected from the group consisting of SEQ ID NOS: 4, 6, 8, 10, 12, 14, 16, 18, 20, 22, 24, 26, 28, 30, 32, 34, 36, 43, 45, 47, 49, 51, and 53, wherein said nucleotide molecule encodes a protein comprising HR activity in a plant in the presence of AVR3a^{EM}, and wherein the amino acid sequence comprises at least one of the amino acid substitutions in the LRR domain as set forth in FIG. 3; and
(g) a fragment of the nucleotide sequence of any one of (a)-(f), wherein said fragment encodes a protein comprising HR activity in a plant in the presence of AVR3a^{EM}.

23. The method of claim 20, further comprising regenerating a transformed plant from said transformed cell.

24. The method of claim 20, wherein the R3a gene is native to the genome of the potato plant or was introduced into the genome of the plant or progenitor thereof by transformation.

25. The method of claim 20, wherein the R3a gene is a wild-type or mutant R3a gene.

26. A plant or plant cell produced by the method of claim 20.

27. A polypeptide comprising an amino acid sequence selected from the group consisting of:
(a) the amino acid sequence of a modified R3a protein that is capable of inducing a hypersensitive response in a plant in the presence of AVR3a^{EM};
(b) the amino acid sequence of a modified R3a protein that is capable of inducing a hypersensitive response in a plant in the presence of AVR3a^{EM} and that is capable of inducing a hypersensitive response in a plant in the presence of AVR3a^{KI};
(c) the amino acid sequence set forth in SEQ ID NO: 4, 6, 8, 10, 12, 14, 16, 18, 20, 22, 24, 26, 28, 30, 32, 34, 36, 43, 45, 47, 49, 51, or 53;
(d) an amino acid sequence encoded by the nucleotide sequence set forth in SEQ ID NO: 3, 5, 7, 9, 11, 13, 15, 17, 19, 21, 23, 25, 27, 29, 31, 33, 35, 42, 44, 46, 48, 50, or 52;
(e) an amino acid sequence comprising at least 85% amino acid sequence identity to at least one amino acid sequence selected from the group consisting of SEQ ID NOS: 4, 6, 8, 10, 12, 14, 16, 18, 20, 22, 24, 26, 28, 30, 32, 34, 36, 43, 45, 47, 49, 51, and 53, wherein said polypeptide comprises HR activity in a plant in the presence of AVR3a^{EM};
(f) an amino acid sequence comprising at least 85% amino acid sequence identity to at least one amino acid sequence selected from the group consisting of SEQ ID NOS: 4, 6, 8, 10, 12, 14, 16, 18, 20, 22, 24, 26, 28, 30, 32, 34, 36, 43, 45, 47, 49, 51, and 53, wherein the polypeptide comprises HR activity in a plant in the presence of AVR3a^{EM}, and wherein the amino acid sequence comprises at least one of the amino acid substitutions as set forth in FIG. 3;
(g) an amino acid sequence comprising at least 85% amino acid sequence identity to at least one amino acid sequence selected from the group consisting of SEQ ID NOS: 4, 6, 8, 10, 12, 14, 16, 18, 20, 22, 24, 26, 28, 30, 32, 34, 36, 43, 45, 47, 49, 51, and 53, wherein the polypeptide comprises HR activity in a plant in the presence of AVR3a^{EM}, and wherein the amino acid sequence comprises at least one of the amino acid substitutions in the LRR domain as set forth in FIG. 3; and
(h) a fragment of the amino acid sequence of any one of (a)-(g), wherein said polypeptide comprises HR activity in a plant in the presence of AVR3a^{EM}; and
(g) the amino acid sequence of any one of (e)-(h), wherein said polypeptide further comprises HR activity in a plant in the presence of AVR3a^{KI}.

28. A method of selecting a potato plant for enhanced resistance to Phytophthora infestans, the method comprising
(a) screening one or more potato plants or parts or cells thereof for a nucleotide sequence encoding a modified R3a protein or for a modified R3a protein, wherein the modified R3a protein is capable of inducing a hypersensitive response in a plant in the presence of AVR3a^{EM}; and
(b) selecting a potato plant comprising the nucleotide sequence encoding a modified R3a protein or the modified R3a protein.

29. The method of claim 28, wherein the modified R3a protein is selected from the group consisting of,
(i) a modified R3a protein comprising at least one amino acid substitution as set forth in FIG. 3,
(ii) a modified R3a protein comprising at least one amino acid substitution in the LRR domain as set forth in FIG. 3,
(iii) a modified R3a protein comprising an amino acid sequence that differs from the wild-type R3a amino acid sequence by a single amino acid substitution,
(iv) a modified R3a protein comprising an amino acid sequence that differs from the wild-type R3a amino acid sequence by a single amino acid substitution in the LRR domain,
(v) a modified R3a protein comprising an amino acid sequence that differs from the wild-type R3a amino acid sequence by a single amino acid substitution, wherein the single amino acid substitution is selected from the group consisting of L668P, K920E, E941K, C950R, E983K, and K1250R, and
(vi) a modified R3a protein comprising an amino acid sequence selected from the group consisting of, the amino acid sequences set forth in SEQ ID NOS: 32, 43, 45, 49, 51 and 53 and the amino acid sequences encoded by the nucleotide sequences set forth in SEQ ID NOS: 31, 42, 44, 48, 50 and 52.

30. The method of claim 28, wherein the one or more potato plants is from a population of plants that has been mutagenized or descended from plants that have been mutagenized.

31. A plant selected by the method of claim 28 or a progeny plant thereof comprising the nucleotide sequence encoding the modified R3a protein.

32. A method of enhancing the resistance of a potato plant to Phytophthora infestans, the method comprising crossing a first potato plant with a second potato plant, wherein the first potato plant was selected by the method of claim 28, wherein a progeny plant resulting from said crossing has enhanced resistance to Phytophthora infestans, when compared to the resistance of at least one of the first plant and the second plant.

33. A progeny plant produced by the method of claim 32.

34. A method for making an R protein with altered recognition specificity for an effector protein of a plant pathogen, said method comprising, substituting at least one amino acid in the amino sequence of an R protein with a different amino acid, so as to produce a modified R protein,
wherein the unmodified R protein is capable of causing a hypersensitive response when the unmodified R protein is present in a plant with a first effector protein but is not capable of causing a hypersensitive response when the unmodified R protein is present in a plant with a second effector protein, and
wherein modified R protein is capable of causing a hypersensitive response when the modified R protein is present in a plant with the second effector protein.

35. The method of claim 34, wherein the modified R protein is produced by altering the coding sequence of the R protein whereby the altered coding sequence encodes an amino acid sequence that comprises at least one amino acid substitution when compared to the amino acid sequence of the unmodified R protein.

36. The method of claim 35, wherein the coding sequence is altered by making a targeted change in one or more nucleotides in the coding sequence or by random mutagenesis.

37. The method of claim 34, further comprising testing the modified R protein to determine if it causes a hypersensitive response when the modified R protein is present in a plant with the second effector protein.

38. The method of claim 37, further comprising testing the modified R protein to determine if it causes a hypersensitive response when the modified R protein is present in a plant with the first effector protein.

39. The method of claim 37, wherein the modified R protein comprises altered recognition specificity when the modified R protein is capable of causing a hypersensitive response in a plant in the presence of the second effector protein.

40. The method of claim 34, wherein the plant pathogen is an oomycete.

41. The method of claim 40, wherein the oomycete is selected from the group consisting of Phytophthora infestans, Phytophthora sojae, Phytophthora capsici, and Phytophthora palmivora.

42. The method of claim 41, wherein the first effector is AVR3a^{KI} or AVR3a^{EM}.

43. The method of claim 34, wherein the plant is selected from the group consisting of potato, tomato, eggplant, petunia, Physalis sp., woody nightshade, garden huckleberry, gboma eggplant, Ageratum conyzoides, Solanecio biafrae, peppers, soybean, cocoa, and palms.

44. The method of claim 34, wherein the R protein is R3a.

45. A modified R protein produced by the method of claim 34.

46. A nucleic acid molecule comprising a nucleotide sequence encoding a modified R protein produced by the method of claim 34.

47. A plant or plant cell comprising in its genome the nucleic acid molecule of claim 46.

48. A method for making a modified R protein that is capable of causing in a plant a hypersensitive response of increased severity, said method comprising, substituting at least one amino acid in the amino sequence of an R protein with a different amino acid so as to produce a modified R protein, wherein the modified R protein causes a hypersensitive response in a plant in the presence of an effector protein that is of increased severity, when compared to a hypersensitive response caused in a plant by the unmodified R protein in the presence of the effector protein.

49. The method of claim 48, wherein the modified R protein is produced by altering the coding sequence of the R protein whereby the altered coding sequence encodes an amino acid sequence that comprises at least one amino acid substitution when compared to the amino acid sequence of the unmodified R protein.

50. The method of claim 48, wherein the coding sequence is altered by making a targeted change in one or more nucleotides in the coding sequence or by random mutagenesis.

51. The method of claim 48, further comprising testing the modified R protein to determine if it causes a hypersensitive response when the modified R protein is present in a plant with the effector protein.

52. The method of claim 48, wherein the effector protein is an oomycete effector protein.

53. The method of claim 52, wherein the oomycete is selected from the group consisting of Phytophthora infestans, Phytophthora sojae, Phytophthora capsici, and Phytophthora palmivora.

54. The method of claim 53, wherein the effector is AVR3a^{KI} or AVR3a^{EM}.

55. The method of claim 48, wherein the plant is selected from the group consisting of potato, tomato, eggplant, petunia, Physalis sp., woody nightshade, garden huckleberry, gboma eggplant, Ageratum conyzoides, Solanecio biafrae, peppers, soybean, cocoa, and palms.

56. The method of claim 48, wherein the R protein is R3a.

57. The method of claim 48, wherein the R protein is an R3a protein that has modified to comprise an altered recognition specificity, when compared to a wild-type potato R3a protein.

58. A modified R protein produced by the method of claim 48.

59. A nucleic acid molecule comprising a nucleotide sequence encoding a modified R protein produced by the method of claim 48.

60. A plant comprising in its genome the nucleic acid molecule of claim 59.

61. A nucleic acid molecule comprising a nucleotide sequence selected from the group consisting of:
(a) a nucleotide sequence encoding the amino acid sequence set forth in SEQ ID NO: 54, 55, 56, 57, 58, 59, 60, 61, 62, 63, 64, 65, 66, 67, 68, 69, 70, 71, 72, 73, 74, 75, 76, 77, 78, 79, 80, 81, 82, 83, or 84;
(b) a nucleotide sequence encoding an amino acid sequence comprising at least 85% amino acid sequence identity to at least one amino acid sequence selected from the group consisting of SEQ ID NOS: 54, 55, 56, 57, 58, 59, 60, 61, 62, 63, 64, 65, 66, 67, 68, 69, 70, 71, 72, 73, 74, 75, 76, 77, 78, 79, 80, 81, 82, 83, and 84, wherein said nucleotide molecule encodes a protein comprising HR activity in a plant in the presence of at least one R protein;
(c) a fragment of the nucleotide sequence of (a) or (b), wherein said fragment encodes a protein comprising HR activity in a plant in the presence of at least one R protein; and
(d) a nucleotide sequence that is fully complementary to the nucleotide sequence of any one of (a)-(c).

62. An expression cassette comprising the nucleic acid molecule of claim 61 operably linked to a promoter.

63. A non-human host cell comprising the expression cassette of claim 62.

64. A polypeptide comprising an amino acid sequence selected from the group consisting of:
(a) the amino acid sequence set forth in SEQ ID NO: 54, 55, 56, 57, 58, 59, 60, 61, 62, 63, 64, 65, 66, 67, 68, 69, 70, 71, 72, 73, 74, 75, 76, 77, 78, 79, 80, 81, 82, 83, or 84;
(b) an amino acid sequence comprising at least 85% amino acid sequence identity to at least one amino acid sequence selected from the group consisting of SEQ ID NOS: 54, 55, 56, 57, 58, 59, 60, 61, 62, 63, 64, 65, 66, 67, 68, 69, 70, 71, 72, 73, 74, 75, 76, 77, 78, 79, 80, 81, 82, 83, and 84, wherein said polypeptide comprises HR activity in a plant in the presence of at least one R protein; and
(c) a fragment of the amino acid sequence of (a) or (b), wherein said polypeptide comprises HR activity in a plant in the presence of at least one R protein.

The application's sequence listing, which the Patent Office published only in electronic form, follows.

SEQUENCE LISTING (84 sequences)

SEQ ID NO: 1 - DNA, 3849 bp, Solanum tuberosum
  allele (0)...(0): wild-type R3a
  CDS (1)...(3849)
atggagattggcttagcagttggtggtgcatttctctcttcagctttgaatgttctctttgataggcttgctcctcacggtgatctgctcaacatgtttcagaagcataaggatcatgttaagctcttaaagaagctggaggacattttgctcggtcttcagattgtgctaagtgatgcagagaataaacaagcatcaaatcgacatgtgagccagtggttcaataagcttcagaatgctgtggacggtgctgagaacttgatagaacaagtcaattatgaagctttgaggcttaaggtggaaggccagcatcaaaatcttgcagaaacaagcaaccagcaagtaagtgaccttaacctgtgcttcagtgatgatttctttcttaacataaaggataagttggaagaaaccattgaaacattggaggtgttggaaaagcaaattggtcgccttggcttaaaggaacattttggttcgactaaacaagaaactagaacaccttcaacttctttagttgatgactctgatatctttggaaggcagaatgatatagaggatttgattgaccgtttattatctgaagatgcaagtggaaaaaagcggactgtagttcctattgttggaatgggtggtctgggtaagacaacacttgctaaagcggtttacaatgatgagagagtgcagatacattttggtttgaaagcttggttttgtgtttctgaggcatttgatgctttcagaataacaaaagggttacttcaagaaattggctcatttgacttgaaggctgatgacaatcttaatcagctacaagtcaaattgaaggaaagattaaagggaaagaagtttcttatagttttggatgatgtgtggaatgacaactacaacaagtgggatgaattgagaaatgtttttgtacaaggagatataggaagtaagatcattgtgacgacacgtaaagagagtgttgccttgatgatgggaaatgagcaaattagcatggacaatttgtctactgaatcctcttggtctttatttaaaacacatgcatttgaaaacatgggtcctatgggacatccggaacttgaagaggtcgggaaacaaattgcagctaagtgcaaaggactgcccttagctctgaagacgctcgctggcatgttacgctccaaatcagaggttgaagagtggaaacgtattttgagaagtgaaatatgggagctgccacacaatgacatattaccagcgttgatgttgagctacaatgatcttcccgcacatttaaagcgatgtttttccttttgtgcaatatttcctaaagattatccctttaggaaagaacaagttattcatctgtggattgccaatggtctcgtaccacaggaagatgtaataattgaagattcaggcaaccaatactttctcgagttgaggtcaagatcattattcgaaagggtcccaaatccttctcaagggaacacagagaatttattcttaatgcatgaccttgtcaatgatttagcgcaaattgcatcttcaaaactttgtatcaggttggaagagagccaaggatctcatatgttggaacaaagtcaacacttatcatattcaatgggatatggtggtgagtttgagaaattgacacccctctacaaattggagcagctgaggacattgcttccgacatgtattgatctccctgattgttgtcaccatctaagcaagagggtgctacataacatactgccaagactaacatccttaagggcattatcgttgtcatgctatgagattgttgagttgccaaatgacttgtttatcaaattaaagctcctcagatttttggatatttctcggacagagattaaaaggttgccagattccatttgtgcattgtataacttagagacacttctcctgtcatcttgttatgatcttgaggagctaccgctgcagatggagaagctgattaacttgcgtcatcttgacataagcaacactcgtctcttgaagatgccgctacatctgagcaagttgaaaagcctccaagtgttagtgggagccaaatttcttataggtggtttgagaatggaagatttgggtgaagtacataacttgtacggatctctatcagttgtagagttgcaaaatgtggttgatagaagggaagctgtgaaggcaaagatgagggagaagaatcacgtcgacaggttatatttggagtggagtggaagtagtagtgccgacaattcacaaacagaaagagacatacttgatgagctacgcccccataaaaacataaaagtagtcaaaatcactggatatagagggacaaactttcccaattggctagctgatcctttgtttcttaagctggtaaaattgtctcttagaaactgcaagaactgttattcattgccagcactaggacaactcccttttctgaaattcctttcgattagagagatgcatggaataacagaggtgacggaagaattctatggcagttggtcctccaaaaagccttttaactgtcttgagaagcttgaatttaaagatatgccggagtggaagcaatgggacctactaggaagtggagagttccctatacttgagaagcttttgattgaaaattgccctgaactcagtttggagacggtacccatccaactttcaagtttaaaaagttttgacgtaattggttctcccttggttataaactttcctttaagcatactgcccactaccttgaagagaataaagatatctgattgccagaaattgaaattggaacagccaactggtgagattagtatgtttctggaggaattgacactgattaaatgtgattgtatagatgatatatcacctgagttactcccaagagcacgcaaattgtgggtacaggattggcacaaccttactaggtttttgattcctactgccactgaaactctcgatatttggaattgtgagaatgttgaaatactttcggtggcatgtggggggacccagatgacgtcactgactattgcctactgtaagaagctgaagtggctgccagaacgtatgcaggaactccttccatctcttaaggaactgcatctgtctaattgtccagaaatagagtcctttcctgaaggtggattgcccttcaatttacaacaacttgcgatcagatattgcaagaaactggtgaacggccgaaaggagtggcatttacagagacgactctgtctcacagcgttaatcatctaccatgatggcagtgacgaagagattgttggtggtgagaattgggagttgccttcctctattcaaaggcttaccatagtgaatctgaaaacattaagcagccaacatctcaaaaacctcacctctcttcaatatctatttattaggggtaatttacctcagattcagccaatgctggaacaaggccagtgttcgcacctcacttcgcttcaaagtctacaaatctcctccctccaatcacttcctgaatcggcactgccctcctccctctctcacctggagatctcccattgccctaatctccaatcacttcctgaatcggcactgccctcctccctctctcagctgaccatcaataattgccctaatctccaatcactttccgaatcaacactgccctcctccctctctcagctggagatctccttttgccctaatctccaatatcttccactaaaagggatgccctcttccctctctgaactatctatttacaaatgcccattgctcaaaccacaactagaatttgacaagggggaatactggccaaatattgctcaatttcccaccataaagatcgatagggaatgcatgtga

SEQ ID NO: 2 - protein, 1282 aa, Solanum tuberosum
MEIGLAVGGAFLSSALNVLFDRLAPHGDLLNMFQKHKDHVKLLKKLEDILLGLQIVLSDAENKQASNRHVSQWFNKLQNAVDGAENLIEQVNYEALRLKVEGQHQNLAETSNQQVSDLNLCFSDDFFLNIKDKLEETIETLEVLEKQIGRLGLKEHFGSTKQETRTPSTSLVDDSDIFGRQNDIEDLIDRLLSEDASGKKRTVVPIVGMGGLGKTTLAKAVYNDERVQIHFGLKAWFCVSEAFDAFRITKGLLQEIGSFDLKADDNLNQLQVKLKERLKGKKFLIVLDDVWNDNYNKWDELRNVFVQGDIGSKIIVTTRKESVALMMGNEQISMDNLSTESSWSLFKTHAFENMGPMGHPELEEVGKQIAAKCKGLPLALKTLAGMLRSKSEVEEWKRILRSEIWELPHNDILPALMLSYNDLPAHLKRCFSFCAIFPKDYPFRKEQVIHLWIANGLVPQEDVIIEDSGNQYFLELRSRSLFERVPNPSQGNTENLFLMHDLVNDLAQIASSKLCIRLEESQGSHMLEQSQHLSYSMGYGGEFEKLTPLYKLEQLRTLLPTCIDLPDCCHHLSKRVLHNILPRLTSLRALSLSCYEIVELPNDLFIKLKLLRFLDISRTEIKRLPDSICALYNLETLLLSSCYDLEELPLQMEKLINLRHLDISNTRLLKMPLHLSKLKSLQVLVGAKFLIGGLRMEDLGEVHNLYGSLSVVELQNVVDRREAVKAKMREKNHVDRLYLEWSGSSSADNSQTERDILDELRPHKNIKVVKITGYRGTNFPNWLADPLFLKLVKLSLRNCKNCYSLPALGQLPFLKFLSIREMHGITEVTEEFYGSWSSKKPFNCLEKLEFKDMPEWKQWDLLGSGEFPILEKLLIENCPELSLETVPIQLSSLKSFDVIGSPLVINFPLSILPTTLKRIKISDCQKLKLEQPTGEISMFLEELTLIKCDCIDDISPELLPRARKLWVQDWHNLTRFLIPTATETLDIWNCENVEILSVACGGTQMTSLTIAYCKKLKWLPERMQELLPSLKELHLSNCPEIESFPEGGLPFNLQQLAIRYCKKLVNGRKEWHLQRRLCLTALIIYHDGSDEEIVGGENWELPSSIQRLTIVNLKTLSSQHLKNLTSLQYLFIRGNLPQIQPMLEQGQCSHLTSLQSLQISSLQSLPESALPSSLSHLEISHCPNLQSLPESALPSSLSQLTINNCPNLQSLSESTLPSSLSQLEISFCPNLQYLPLKGMPSSLSELSIYKCPLLKPQLEFDKGEYWPNIAQFPTIKIDRECM

SEQ ID NO: 3 - DNA, 3849 bp, Artificial Sequence
  mutant R3a
  allele (0)...(0): 1A/A1
  CDS (1)...(3849)
atggagattggcttagcagttggtggtgcatttctctcttcagctttgaatgttctctttgataggcttgctcctcacggtgatctgctcaacatgtttcagaagcataaggatcatgttaagctcttaaagaagctggaggacattttgctcggtcttcagattgtgctaagtgatgcagagaataaacaagcatcaaatcgacatgtgagccagtggttcaataagcttcagaatgctgtggacggtgctgagaacttgatagaacaagtcaattatgaagctttgaggcttaaggtggaaggccagcatcaaaatcttgcagaaacaagcaaccagcaagtaggtgaccttaacctgtgcttcagtgatgatttctttcttaacataaaggataagttggaagaaaccattgaaacattggaggtgttggaaaagcaaattggtcgccttggcttaaaggaacattttggttcgactaaacaagaaactagaacaccttcaacttctttagttgatgactctgatatctttggaaggcagaatgatatagaggatttgattgaccgtttattatctgaagatgcaagtggaaaaaagcggactgtagttcctattgttggaatgggtggtctgggtaagacaacacttgctaaagcggtttacaatgatgagagagtgcagatacattttggtttgaaagcttggttttgtgtttctgaggcatttgatgctttcagaataacaaaagggttacttcaagaaattggctcatttgacttgaaggctgatgacaatcttaatcagctacaagtcaaattgaaggaaagattaaagggaaagaagtttcttatagttttggatgatgtgtggaatgacaactacaacaagtgggatgaattgagaaatgtttttgtacaaggagatataggaagtaagatcattgtgacgacacgtaaagagagtgttgccttgatgatgggaaatgagcaaattagcatggacaatttgtctactgaatcctcttggtctttatttaaaacacatgcatttgaaaacatgggtcctatgggacatccggaacttgaagaggtcgggaaacaaattgcagctaagtgcaaaggactgcccttagctctgaagacgctcgctggcatgttacgctccaaatcagaggttgaagagtggaaacgtattttgagaagtgaaatatgggagctgccacacaatgacatattaccagcgttgatgttgagctacaatgatcttcccgcacatttaaagcgatgtttttccttttgtgcaatatttcctaaagattatccctttaggaaagaacaagttattcatctgtggattgccaatggtctcgtaccacaggaagatgtaataattgaagattcaggcaaccaatactttctcgagttgaggtcaagatcattattcgaaagggtcccaaatccttctcaagggaacacagagaatttattcttaatgcatgaccttgtcaatgatttagcgcaaattgcatcttcaaaactttgtatcaggttggaagagagccaaggatctcatatgttggaacaaagtcaacacttatcatattcaatgggatatggtggtgagtttgagaaattgacacccctctacaaattggagcagctgaggacattgcttccgacatgtattgatctccctgattgttgtcaccatctaagcaagagggtgctacataacatactgccaagactaacatccttaagggcattatcgttgtcatgctatgagattgttgagttgccaaatgacttgtttatcaaattaaagctcctcagatttttggatatttctcggacagagattaaaaggttgccagattccatttgtgcattgtataacttagagacacttctcctgtcatcttgttatgatcttgaggagctaccgctgcagatggagaagctgattaacttgcgtcatcttgacataagcaacactcgtctcttgaagatgccgctacatctgagcaagttgaaaagcctccaagtgttagtgggagccaaatttcttataggtggtttgagaatggaagatttgggtgaagtacataacttgtacggatctctatcagttgtggagttgcaaaatgtggttgatagaagggaagctgtgaaggcaaagatgagggagaagaatcacgtcgacaggttatatttggagtggagtggaagtagtagtgccgacaattcacaaacagaaagagacatacttgatgagctacgcccccataaaaacataaaagtagtcaaaatcactggatatagagggacaaactttcccaattggctagctgatcctttgtttcttaagctggtaaaattgtctcttagaaactgcaagaactgttattcattgccagcactaggacaactcccttttctgaaattcctttcgattagagagatgcatggaataacagaggtgacggaagaattctatggcagttggtcctccaaaaagccttttaactgtcttgagaagcttgaatttaaagatatgccggagtggaagcaatgggacctactaggaagtggagagttccctatacttgagaagcttttgattgaaaattgccctgaactcagttgggagacggtacccatccaactttcaagtttaaaaagttttgacgtaattggttctcccttggttataaactttcctttaagcatactgcccactaccttgaagagaataaagatatctgattgccagaaattgaaattggaacagccaactggtgagattagtatgtttctggaggaattgacactgattaaatgtgattgtgtagatgatatatcacctgagttactcccaagagcacgcaaattgtgggtacaggattggcacaaccttactaggtttttgattcctactgccactgaaactctcgatatttggaattgtgagaatgttgaaatactttcggtggcatgtggggggacccagatgacgtcactgactattgcctactgtaagaagctgaagtggctgccagaacgtatgcaggaactccttccatctcttaaggaactgcatctgtctaattgtccagaaatagagtcctttcctgaaggtggattgcccttcaatttacaacaacttgcgatcagatattgcaagaaactggtgaacggccgaaaggagtggcatttacagagacgactctgtctcacagcgttaatcatctaccatgatggcagtgacgaagagattgttggtggtgagaattgggagttgccttcctctattcaaaggcttaccatagtgaatctgaaaacattaagcagccaacatctcaaaaacctcacctctcttcaatatctatttattaggggtaatttacctcagattcagccaatgctggaacaaggccagtgttcgcacctcacttcgcttcaaagtctacaaatctcctccctccaatcacttcctgaatcggcactgccctcctccctctctcacctggagatctcccattgccctaatctccaatcacttcctgaatcggcactgccctcctccctctctcagctgaccatcaataattgccctaatctccaatcactttccgaatcaacactgccctcctccctctctcagctggagatctccttttgccctaaactccaatatcttccactaaaagggatgccctcttccctctctgaactatctatttacaaatgcccattgctcaaaccacaactagaatttgacaagggggaatactggccaaatattgctcaatttcccaccataaagatcgatagggaatgcatgtga

SEQ ID NO: 4 - protein, 1282 aa, Artificial Sequence
  protein encoded by mutant R3a
MEIGLAVGGAFLSSALNVLFDRLAPHGDLLNMFQKHKDHVKLLKKLEDILLGLQIVLSDAENKQASNRHVSQWFNKLQNAVDGAENLIEQVNYEALRLKVEGQHQNLAETSNQQVGDLNLCFSDDFFLNIKDKLEETIETLEVLEKQIGRLGLKEHFGSTKQETRTPSTSLVDDSDIFGRQNDIEDLIDRLLSEDASGKKRTVVPIVGMGGLGKTTLAKAVYNDERVQIHFGLKAWFCVSEAFDAFRITKGLLQEIGSFDLKADDNLNQLQVKLKERLKGKKFLIVLDDVWNDNYNKWDELRNVFVQGDIGSKIIVTTRKESVALMMGNEQISMDNLSTESSWSLFKTHAFENMGPMGHPELEEVGKQIAAKCKGLPLALKTLAGMLRSKSEVEEWKRILRSEIWELPHNDILPALMLSYNDLPAHLKRCFSFCAIFPKDYPFRKEQVIHLWIANGLVPQEDVIIEDSGNQYFLELRSRSLFERVPNPSQGNTENLFLMHDLVNDLAQIASSKLCIRLEESQGSHMLEQSQHLSYSMGYGGEFEKLTPLYKLEQLRTLLPTCIDLPDCCHHLSKRVLHNILPRLTSLRALSLSCYEIVELPNDLFIKLKLLRFLDISRTEIKRLPDSICALYNLETLLLSSCYDLEELPLQMEKLINLRHLDISNTRLLKMPLHLSKLKSLQVLVGAKFLIGGLRMEDLGEVHNLYGSLSVVELQNVVDRREAVKAKMREKNHVDRLYLEWSGSSSADNSQTERDILDELRPHKNIKVVKITGYRGTNFPNWLADPLFLKLVKLSLRNCKNCYSLPALGQLPFLKFLSIREMHGITEVTEEFYGSWSSKKPFNCLEKLEFKDMPEWKQWDLLGSGEFPILEKLLIENCPELSWETVPIQLSSLKSFDVIGSPLVINFPLSILPTTLKRIKISDCQKLKLEQPTGEISMFLEELTLIKCDCVDDISPELLPRARKLWVQDWHNLTRFLIPTATETLDIWNCENVEILSVACGGTQMTSLTIAYCKKLKWLPERMQELLPSLKELHLSNCPEIESFPEGGLPFNLQQLAIRYCKKLVNGRKEWHLQRRLCLTALIIYHDGSDEEIVGGENWELPSSIQRLTIVNLKTLSSQHLKNLTSLQYLFIRGNLPQIQPMLEQGQCSHLTSLQSLQISSLQSLPESALPSSLSHLEISHCPNLQSLPESALPSSLSQLTINNCPNLQSLSESTLPSSLSQLEISFCPKLQYLPLKGMPSSLSELSIYKCPLLKPQLEFDKGEYWPNIAQFPTIKIDRECM

SEQ ID NO: 5 - DNA, 3849 bp, Artificial Sequence
  mutant R3a
  allele (0)...(0): 1B/A10
  CDS (1)...(3849)
atggagattggcttagcagttggtggtgcatttctctcttcagctttgaatgttctctttgataggcttgctcctcacggtgatctgctcaacatgtttcagaagcataaggatcatgttaagctcttaaagaagctggaggacattttgctcggtcttcagattgtgctaagtgaagcagagaataaacaagcatcaaatcaacatgtgagccagtggttcaataagcttcagaatgctgtggacggtgctgagaacttgatagaacaagtcaattatgaagctttgaggcttaaggtggaaggccagcatctaaatcttgcagaaacaagcaaccagcaagtaagtgaccttaacctgtgcttcagtgatgatttctttcttaacataaaggataagttggaagaaaccattgaaacattggaggtgttggaaaagcaaattggtcgccttggcttaaaggaacattttggttcgactaaacaagaaactagaacaccttcaacttctttagttgatgactctgatatctttggaaggcagaatgatatagaggatttgattgaccgtttattatctgaagatgcaagtggaaaaaagcggactgtagttcctattgttggaatgggtggtctgggtaagacaacacttgctaaagcggtttacaatgatgagagagtgcagatacattttggtttgaaagcttggttttgtgtttctgaggcatttgatgctttcagaataacaaaagggttacttcaagaaattggctcatttgacttgaaggctgatgacaatcttaatcagctacaagtcaaattgaaggaaagattaaagggaaagaagtttcttatagttttggatgatgtgtggaatgacaactacaacaagtgggttgaattgagaaatgtttttgtacaaggagatataggaagtaagatcattgtgacgacacgtaaagagagtgttgccttgatgatgggaaatgagcaaattagcatggacaatttgtctactgaatcctcttggtctttatttaaaacacatgcatttgaaaacatgggtcctatgggacatccggaacttgaagaggtcgggaaacaaattgcagctaagtgcaaaggactgcccttagctctgaagacgctcgctggcatgttacgctccaaatcagaggttgaagagtggaaacgtattttgagaagtgaaatatgggagctgccacacaatgacatattaccagcgttgatgttgagctacaatgatcttcccgcacatttaaagcgatgtttttccttttgtgcaatatttcctaaagattatccctttaggaaagaacaagttattcatctgtggattgccaatggtctcgtaccacaggaagatgtaataattgaagattcaggcaaccaatactttctcgagttgaggtcaagatcattattcgaaagggtcccaaatccttctcaagggaacacagagaatttattcttaatgcatgaccttgtcaatgatttagcgcaaattgcatcttcaaaactttgtatcaggttggaagagagccaaggatctcatatgttggaacaaagtcaacacttatcatattcaatgggatatggtggtgagtttgagaaattgacacccctctacaaattggagcagctgaggacattgcttccgacatgtattgatctccctgattgttgtcaccatctaagcaagagggtgctacataacatactgccaagactaacatccttaagggcattatcgttgtcatgctatgagattgttgagttgccaaatgacttgtttatcaaattaaagctcctcagatttttggatatttctcggacagagattaaaaggttgccagattccatttgtgcattgtataacttagagacacttctcctgtcatcttgttatgatcttgaggagctaccgctgcagatggagaagctgattaacttgcgtcatcttgacataagcaacactcgtctcttgaagatgccgctacatctgagcaagttgaaaagcctccaagtgttagtgggagccaaatttcttataggtggtttgagaatggaagatttgggtgaagtacataacttgtacggatctctatcagttgtagagttgcaaaatgtggttgatagaagggaagctgtgaaggcaaagatgagggagaagaatcacgtcgacaggttatatttggagtggagtggaagtagtagtgccgacaattcacaaacagaaagagacatacttgatgagctacgcccccataaaaacataaaagtagtcaaaatcactggatatagagggacaaactttcccaattggctagctgatcctttgtttcttaagctggtaaaattgtctcttagaaactgcaagaactgttattcattgccagcactaggacaactcccttttctgaaattcctttcgattagagagatgcatggaataacagaggtgacggaagaattctatggcagttggtcctccaaaaagccttttaactgtcttgagaagcttgaatttaaagatatgccggagtggaagcaatgggacctactaggaagtggagagttccctatacttgagaagcttttgattgaaaattgccctgaactcagtttggagacggtacccatccaactttcaagtttaaaaagttttgacgtaattggttctcccttggttataaactttcctttaagcatactgcccactaccttgaagagaataaagatatctgattgccagaaattgaaattggaacagccaactggtgagattagtatgtttctgaaggaattgacactgattaaatgtgattgtatagatgatatatcacctgagttactcccaagagcacgcaaattgtgggtacaggattggcacaaccttactaggtttttgattcctactgccactgaaactctcgatatttggaattgtgagaatgttgaaatactttcggtggcatgtggggggacccagatgacgtcactgactattgcctactgtaagaagctgaagtggctgccagaacgtatgcaggaactccttccatctcttaaggaactgcatctgtctaattgtccagaaatagagtcctttcctgaaggtggattgcccttcaatttacaacaacttgcgatcagatattgcaagaaactggtgaacggccgaaaggagtggcatttacagagacgactctgtctcacagcgttaatcatctaccatgatggcagtgacgaagagattgttggtggtgagaattgggagttgccttcctctattcaaaggcttaccatagtgaatctgaaaacattaagcagccaacatctcaaaaacctcacctctcttcaatatctatttattaggggtaatttacctcagattcagccaatgctggaacaaggccagtgttcgcacctcacttcgcttcaaagtctacaaatctcctccctccaatcacttcctgaatcagcactgccctcctccctctctcacctggagatctcccattgccctaatctccaatcacttcctgaatcggcactgccctcctccctctctcagctgaccatcaataattgccctaatctccaatcactttccgaatcaacactgccctcctccctctctcagctggagatctccttttgccctaatctccaatatcttccactaaaagggatgccctcttccctctctgaactatctatttacaaatgcccattgctcaaaccacaactagaatttgacaagggggaatactggccaaatattgctcaatttcccaccataaagatcgatagggaatgcatgtga

SEQ ID NO: 6 - protein, 1282 aa, Artificial Sequence
  protein encoded by mutant R3a
MEIGLAVGGAFLSSALNVLFDRLAPHGDLLNMFQKHKDHVKLLKKLEDILLGLQIVLSEAENKQASNQHVSQWFNKLQNAVDGAENLIEQVNYEALRLKVEGQHLNLAETSNQQVSDLNLCFSDDFFLNIKDKLEETIETLEVLEKQIGRLGLKEHFGSTKQETRTPSTSLVDDSDIFGRQNDIEDLIDRLLSEDASGKKRTVVPIVGMGGLGKTTLAKAVYNDERVQIHFGLKAWFCVSEAFDAFRITKGLLQEIGSFDLKADDNLNQLQVKLKERLKGKKFLIVLDDVWNDNYNKWVELRNVFVQGDIGSKIIVTTRKESVALMMGNEQISMDNLSTESSWSLFKTHAFENMGPMGHPELEEVGKQIAAKCKGLPLALKTLAGMLRSKSEVEEWKRILRSEIWELPHNDILPALMLSYNDLPAHLKRCFSFCAIFPKDYPFRKEQVIHLWIANGLVPQEDVIIEDSGNQYFLELRSRSLFERVPNPSQGNTENLFLMHDLVNDLAQIASSKLCIRLEESQGSHMLEQSQHLSYSMGYGGEFEKLTPLYKLEQLRTLLPTCIDLPDCCHHLSKRVLHNILPRLTSLRALSLSCYEIVELPNDLFIKLKLLRFLDISRTEIKRLPDSICALYNLETLLLSSCYDLEELPLQMEKLINLRHLDISNTRLLKMPLHLSKLKSLQVLVGAKFLIGGLRMEDLGEVHNLYGSLSVVELQNVVDRREAVKAKMREKNHVDRLYLEWSGSSSADNSQTERDILDELRPHKNIKVVKITGYRGTNFPNWLADPLFLKLVKLSLRNCKNCYSLPALGQLPFLKFLSIREMHGITEVTEEFYGSWSSKKPFNCLEKLEFKDMPEWKQWDLLGSGEFPILEKLLIENCPELSLETVPIQLSSLKSFDVIGSPLVINFPLSILPTTLKRIKISDCQKLKLEQPTGEISMFLKELTLIKCDCIDDISPELLPRARKLWVQDWHNLTRFLIPTATETLDIWNCENVEILSVACGGTQMTSLTIAYCKKLKWLPERMQELLPSLKELHLSNCPEIESFPEGGLPFNLQQLAIRYCKKLVNGRKEWHLQRRLCLTALIIYHDGSDEEIVGGENWELPSSIQRLTIVNLKTLSSQHLKNLTSLQYLFIRGNLPQIQPMLEQGQCSHLTSLQSLQISSLQSLPESALPSSLSHLEISHCPNLQSLPESALPSSLSQLTINNCPNLQSLSESTLPSSLSQLEISFCPNLQYLPLKGMPSSLSELSIYKCPLLKPQLEFDKGEYWPNIAQFPTIKIDRECM

SEQ ID NO: 7 - DNA, 3849 bp, Artificial Sequence
  mutant R3a
  allele (0)...(0): 1B/F10
  CDS (1)...(3849)
atggagattggcttagcagttggtggtgcatttctctcttcagctttgaatgttctctttgataggcttgctcctcacggtgatctgctcaacatgtttcagaagcataaggatcatgttaagctcttaaagaagctggaggacattttgctcggtcttcagattgtgctaagtgatgcagagaataaacaagcatcaaatcgacatgtgagccagtggttcaataagcttcagaatgctgtggacggtgctgagaacttgatagaacaagtcaattatgaagctttgaggcttaaggtggaaggccagcatcaaaatcttgcagaaacaagcaaccagcaagtaagtgaccttaacctgtgcctcagtgatgatttctttcttaacataaaggataagttggaagaaaccattgaaacattggaggtgttggaaaagcaaattggtcgccttggcttaaaggaacattttggttcgactaaacaagaaactagaacaccttcaacttctttagttgatgactctgatatctttggaaggcagaatgatatagaggatttgattgaccgtttattatctgaagatgcaagtggaaaaaagcggactgtagttcctattgttggaatgggtggtctgggtaagacaacacttgctaaagcggtttacaatgatgagagagtgcagatacattttggtttgaaagcttggttttgtgtttctgaggcatttgatgctttcagaataacaaaagggttacttcaagaaattggctcatttgacttgaaggctgatgacaatcttaatcagctacaagtcaaattgaaggaaagattaaagggaaagaagtttcttatagttttggatgatgtgtggaatgacaactacaacaagtgggatgaattgagaaatgtttttgtacaaggagatataggaagtaagatcattgtgacgacacgtaaagagagtgttgccttgatgatgggaaatgagcaaattagcatggacaatttgtctactgaatcctcttggtctttatttaaaacacatgcatttgaaaacatgggtcctatgggacatccggaacttgaagaggtcgggaaacaaattgcagctaagtgcaaaggactgcccttagctctgaagacgctcgctggcatgttacgctccaaatcagaggttgaagagtggaaacgtattttgagaagtgaaatatgggagctgccacacaatgacatattaccagcgttgatgttgagctacaatgatcttcccgcacatttaaagcgatgtttttccttttgtgcaatatttcctaaagattatccctttaggaaagaacaagttattcatctgtggattgccaatggtctcgtaccacaggaagatgtaataattgaagattcaggcaaccaatactttctcgagttgaggtcaagatcattattcgaaagggtcccaaatccttctcaagggaacacagagaatttattcttaatgcatgaccttgtcaatgatttagcgcaaattgcatcttcaaaactttgtatcaggttggaagagagccaaggatctcatatgttggaacaaagtcaacacttatcatattcaatgggatatggtggtgagtttgagaaattgacacccctctacaaattggagcagctgaggacattgcttccgacatgtattgatctccctgattgttgtcaccatctaagcaagagggtgctacataacatactgccaagactaacatccttaagggcattatcgttgtcatgctatgagattgttgagttgccaaatgacttgtttatcaaattaaagctcctcagatttttggatatttctcggacagagattaaaaggttgccagattccatttgtgcattgtataacttagagacacttctcctgtcatcttgttatgatcttgaggagctaccgctgcagatggagaagctgattaacttgcgtcatcttgacataagcaacacttgtctcttgaagatgccgctacatctgagcaagttgaaaagcctccaagtgttagtgggagccaaatttcttataggtggtttgagaatggaagatttgggtgaagtacataacttgtacggatctctatcagttgtagagttgcaaaatgtggttgatagaagggaagctgtgaaggcaaagatgagggagaagaatcacgtcgacaggttgtatttggagtggagtggaagtagtagtgccgacaattcacaaacagaaagagacatacttgatgagctacgcccccataaaaacataaaagtagtcaaaatcactggatatagagggacaaactttcccaattggctagctgatcctttgtttcttaagctggtaaaattgtctcttagaaactgcaagaactgttattcattgccagcactaggacaactcccttttctgaaattcctttcgattagagagatgcatggaataacagaggtgacggaagaattctatggcagttggtcctccaaaaagccttttaactgtcttgagaagcttgaatttaaagatatgccggagtggaagcaatgggacctactaggaagtggagagttccctatacttgagaagcttttgattgaaaattgccctgaactcagtttggagacggtacccatccaactttcaagtttaaaaagttttgacgtaattggttctcccttggttataaactttcctttaagcatactgcccactaccttgaagagaataaagatatctgattgccagaaattgaaattggaacagccaactggtgagattagtatgtttctggaggaattgacactgattaaatgtgattgtatagatgataaatcacctgagttactcccaagagcacgcaaattgtgggtacaggattggcacaaccttactaggtttttgattcctactgccactgaaactctcgatatttggaattgtgagaatgttgaaatactttcggtggcatgtggggggacccagatgacgtcactgactattgcctactgtaagaagctgaagtggctgccagaacgtatgcaggaactccttccatctcttaaggaactgcatctgtctaattgtccagaaatagagtcctttcctgaaggtggattgcccttcaatttacaacaacttgcgatcagatattgcaagaaactggtgaacggccgaaaggagtggcatttacagagacgactctgtctcacagcgttaatcatctaccatgatggcagtgacgaagagattgttggtggtgagaattgggagttgccttcctctattcaaaggcttaccatagtgaatctgaaaacattaagcagccaacatctcaaaaacctcacctctcttcaatatctatttattaggggtaatttacctcagattcagccaatgctggaacaaggccagtgttcgcacctcacttcgcttcaaagtctacaaatctcctccctccaatcacttcctgaatcggcactgccctcctccctctctcacctggagatctcccattgccctaacctccaatcacttcctgaatcggcactgccctcctccctctctcagctgaccatcaataattgccctaatctccaatcactttccgaatcaacactgccctcctccctctctcagctggagatctccttttgccctaatctccaatatcttccactaaaagggatgccctcttccctctctgaactatctatttacaaatgcccattgctcaaaccacaactagaatttgacaagggggaatactggccaaatattgctcaatttcccaccataaagatcgatagggaatgcatgtga

SEQ ID NO: 8 - protein, 1282 aa, Artificial Sequence
  protein encoded by mutant R3a
MEIGLAVGGAFLSSALNVLFDRLAPHGDLLNMFQKHKDHVKLLKKLEDILLGLQIVLSDAENKQASNRHVSQWFNKLQNAVDGAENLIEQVNYEALRLKVEGQHQNLAETSNQQVSDLNLCLSDDFFLNIKDKLEETIETLEVLEKQIGRLGLKEHFGSTKQETRTPSTSLVDDSDIFGRQNDIEDLIDRLLSEDASGKKRTVVPIVGMGGLGKTTLAKAVYNDERVQIHFGLKAWFCVSEAFDAFRITKGLLQEIGSFDLKADDNLNQLQVKLKERLKGKKFLIVLDDVWNDNYNKWDELRNVFVQGDIGSKIIVTTRKESVALMMGNEQISMDNLSTESSWSLFKTHAFENMGPMGHPELEEVGKQIAAKCKGLPLALKTLAGMLRSKSEVEEWKRILRSEIWELPHNDILPALMLSYNDLPAHLKRCFSFCAIFPKDYPFRKEQVIHLWIANGLVPQEDVIIEDSGNQYFLELRSRSLFERVPNPSQGNTENLFLMHDLVNDLAQIASSKLCIRLEESQGSHMLEQSQHLSYSMGYGGEFEKLTPLYKLEQLRTLLPTCIDLPDCCHHLSKRVLHNILPRLTSLRALSLSCYEIVELPNDLFIKLKLLRFLDISRTEIKRLPDSICALYNLETLLLSSCYDLEELPLQMEKLINLRHLDISNTCLLKMPLHLSKLKSLQVLVGAKFLIGGLRMEDLGEVHNLYGSLSVVELQNVVDRREAVKAKMREKNHVDRLYLEWSGSSSADNSQTERDILDELRPHKNIKVVKITGYRGTNFPNWLADPLFLKLVKLSLRNCKNCYSLPALGQLPFLKFLSIREMHGITEVTEEFYGSWSSKKPFNCLEKLEFKDMPEWKQWDLLGSGEFPILEKLLIENCPELSLETVPIQLSSLKSFDVIGSPLVINFPLSILPTTLKRIKISDCQKLKLEQPTGEISMFLEELTLIKCDCIDDKSPELLPRARKLWVQDWHNLTRFLIPTATETLDIWNCENVEILSVACGGTQMTSLTIAYCKKLKWLPERMQELLPSLKELHLSNCPEIESFPEGGLPFNLQQLAIRYCKKLVNGRKEWHLQRRLCLTALIIYHDGSDEEIVGGENWELPSSIQRLTIVNLKTLSSQHLKNLTSLQYLFIRGNLPQIQPMLEQGQCSHLTSLQSLQISSLQSLPESALPSSLSHLEISHCPNLQSLPESALPSSLSQLTINNCPNLQSLSESTLPSSLSQLEISFCPNLQYLPLKGMPSSLSELSIYKCPLLKPQLEFDKGEYWPNIAQFPTIKIDRECM

SEQ ID NO: 9 - DNA, 3849 bp, Artificial Sequence
  mutant R3a
  allele (0)...(0): 1B/H5
  CDS (1)...(3849)
atggagattggcttagcagttggtggtgcatttctctcttcagctttgaatgttctctttgataggcttgctcctcacggtgatctgctcaacatgtttcagaagcataaggatcatgttaagctcttaaagaagctggaggacattttgctcggtcttcagattgtgctaagtgatgcagagaataaacaagcatcaaatcgacatgtgagccagtggttcaataagcttcagaatgctgtggacggtgctgagaacttgatagaacaagtcaattatgaagctttgaggcttaaggtggaaggccagcatcaaaatcttgcagaaacaagcaaccagcaagtaagtgaccttaacctgtgcttcagtgatgatttctttcttaacataaaggataagttggaagaaaccattgaaacattggaggtgttggaaaagcaaattggtcgccttggcttaaaggaacgttttggttcgactaaacaagaaactagaacaccttcaacttctttagttgatgactctgatatctttggaaggcagaatgatatagaggatttgattgaccgtttattatctgaagatgcaagtggaaaaaagcggactgtagttcctattgttggaatgggtggtctgggtaagacaacacttgctaaagcggtttacaatgatgagagagtgcagatacattttggtttgaaagcttggttttgtgtttctgaggcatttgatgctttcagaataacaaaagggttacttcaagaaattggctcatttgacttgaaggctgatgacaatcttaatcagctacaagtcaaattgaaggaaagattaaagggaaagaagtttcttatagttttggatgatgtgtggaatgacaactacaacaagtgggatgaattgagaaatgtttttgtacaaggagatataggaagtaagatcattgtgacgacacgtaaagagagtgttgccttgatgatgggaaatgagcaaattagcatggacaatttgtctactgaatcctcttggtctttatttaaaacacatgcatttgaaaacatgggtcctatgggacatccggaacttgaagaggtcgggaaacaaattgcagctaagtgcaaaggactgcccttagctctgaagacgctcgctggcatgttacgctccaaatcagaggttgaagagtggaaacgtattttgagaagtgaaatatgggagctgccacacaatgacatattaccagcgttgatgttgagctacaatgatcttcccgcacatttaaagcgatgtttttccttttgtgcaatatttcctaaagattatccctttaggaaagaacaagttattcatctgtggattgccaatggtctcgtaccacaggaagatgtaataattgaagattcaggcaaccaatactttctcgagttgaggtcaagatcattattcgaaagggtcccaaatccttctcaagggaacacagagaatttattcttaatgcatgaccttgtcaatgatttagcgcaaattgcatcttcaaaactttgtatcaggttggaagagagccaaggatctcatatgttggaacaaagtcaacacttatcatattcaatgggatatggtggtgagtttgagaaattgacacccctctacaaattggagcagctgaggacattgcttccgacatgtattgatctccctgattgttgtcaccatctaagcaagagggtgctacataacatactgccaagactaacatccttaagggcattatcgttgtcatgctatgagattgttgagttgccaaatgacttgtttatcaaattaaagctcctcagatttttggatatttctcggacagagattaaaaggttgccagattccatttgtgcattgtataacttagagacacttctcctgtcatcttgttatgatcttgaggagctaccgctgcagatggagaagctgattaacttgcgtcatcttgacataagcaacactcgtctcttgaagatgccgctacatctgagcaagttgaaaagcctccaagtgttagtgggagccaaatttcttataggtggtttgagaatggaagatttgggtgaagtacataacttgtacggatctctatcagttgtagagttgcaaaatgtggttgatagaagggaagctgtgaaggcaaagatgagggagaagaatcacgtcgacaggttatatttggagtggagtggaagtagtagtgccgacaattcacaaacagaaagagacatacttgatgagctacgcccccataaaaacataaaagtagtcaaaatcactggatatagagggacaaactttcccaattggctagctgatcctttgtttcttaagctggtaaaattgtctcttagaaactgcaagaactgttattcattgccagcactaggacaactcccttttctgaaattcctttcgattagagagatgcatggaataacagaggtgacggaagaattctatggcagttggtcctccaaaaagccttttaactgtcttgagaagcttgaatttaaagatatgccggagtggaagcaatgggacctactaggaagtggagagttccctatacttgagaagcttttgattgaaaattgccctgaactcagtttggagacggtacccatccaactttcaagtttaaaaagttttgacgtaattggttctcccttggttataaactttcctttaagcatactgcccactaccttgaagagaataaagatatctgattgccagaaattgaaattggaacagccaactggtgagattagtatgtttctggaggaattgacactgattaaatgtgatcgtatagatgatatatcacctgagttactcccaagagcacgcaaattgtgggtacaggattggcacaaccttactaggtttttgattcctactgccactgaaactctcgatatttggaattgtgagaatgttgaaatactttcggtggcatgtggggggacccagatgacgtcactgactattgcctactgtaagaggctgaagtggctgccagaacgtatgcaggaactccttccatctcttaaggaactgcatctgtctaattgtccagaaatagagtcctttcctgaaggtggattgcccttcaatttacaacaacttgcgatcagatattgcaagaaactggtgaacggccgaaaggagtggcatttacagagacgactctgtctcacagcgttaatcatctaccatgatggcagtgacgaagagattgttggtggtgagaattgggagttgccttcctctattcgaaggcttaccatagtgaatctgaaaacattaagcagccaacatctcaaaaacctcacctctcttcaatatctatttattaggggtaatttacctcagattcagccaatgctggaacaaggccagtgttcgcacctcacttcgcttcaaagtctacaaatctcctccctccaatcacttcctgaatcggcactgccctcctccctctctcacctggagatctcccattgccctaatctccaatcacttcctgaatcggcactgccctcctccctctctcagctgaccatcaataattgccctaatctccaatcactttccgaatcaacactgccctcctccctctctcagctggagatctccttttgccctaatctccaatatcttccactaaaagggatgccctcttccctctctgaactatctatttacaaatgcccattgctcaaaccacaactagaatttgacaagggggaatactggccaaatattgctcaatttcccaccataaagatcgatagggaatgcatgtga

SEQ ID NO: 10 - protein, 1282 aa, Artificial Sequence
  protein encoded by mutant R3a
MEIGLAVGGAFLSSALNVLFDRLAPHGDLLNMFQKHKDHVKLLKKLEDILLGLQIVLSDAENKQASNRHVSQWFNKLQNAVDGAENLIEQVNYEALRLKVEGQHQNLAETSNQQVSDLNLCFSDDFFLNIKDKLEETIETLEVLEKQIGRLGLKERFGSTKQETRTPSTSLVDDSDIFGRQNDIEDLIDRLLSEDASGKKRTVVPIVGMGGLGKTTLAKAVYNDERVQIHFGLKAWFCVSEAFDAFRITKGLLQEIGSFDLKADDNLNQLQVKLKERLKGKKFLIVLDDVWNDNYNKWDELRNVFVQGDIGSKIIVTTRKESVALMMGNEQISMDNLSTESSWSLFKTHAFENMGPMGHPELEEVGKQIAAKCKGLPLALKTLAGMLRSKSEVEEWKRILRSEIWELPHNDILPALMLSYNDLPAHLKRCFSFCAIFPKDYPFRKEQVIHLWIANGLVPQEDVIIEDSGNQYFLELRSRSLFERVPNPSQGNTENLFLMHDLVNDLAQIASSKLCIRLEESQGSHMLEQSQHLSYSMGYGGEFEKLTPLYKLEQLRTLLPTCIDLPDCCHHLSKRVLHNILPRLTSLRALSLSCYEIVELPNDLFIKLKLLRFLDISRTEIKRLPDSICALYNLETLLLSSCYDLEELPLQMEKLINLRHLDISNTRLLKMPLHLSKLKSLQVLVGAKFLIGGLRMEDLGEVHNLYGSLSVVELQNVVDRREAVKAKMREKNHVDRLYLEWSGSSSADNSQTERDILDELRPHKNIKVVKITGYRGTNFPNWLADPLFLKLVKLSLRNCKNCYSLPALGQLPFLKFLSIREMHGITEVTEEFYGSWSSKKPFNCLEKLEFKDMPEWKQWDLLGSGEFPILEKLLIENCPELSLETVPIQLSSLKSFDVIGSPLVINFPLSILPTTLKRIKISDCQKLKLEQPTGEISMFLEELTLIKCDRIDDISPELLPRARKLWVQDWHNLTRFLIPTATETLDIWNCENVEILSVACGGTQMTSLTIAYCKRLKWLPERMQELLPSLKELHLSNCPEIESFPEGGLPFNLQQLAIRYCKKLVNGRKEWHLQRRLCLTALIIYHDGSDEEIVGGENWELPSSIRRLTIVNLKTLSSQHLKNLTSLQYLFIRGNLPQIQPMLEQGQCSHLTSLQSLQISSLQSLPESALPSSLSHLEISHCPNLQSLPESALPSSLSQLTINNCPNLQSLSESTLPSSLSQLEISFCPNLQYLPLKGMPSSLSELSIYKCPLLKPQLEFDKGEYWPNIAQFPTIKIDRECM

SEQ ID NO: 11 - DNA, 3849 bp, Artificial Sequence
  mutant R3a
  allele (0)...(0): 2A/B5
  CDS (1)...(3849)
atggagattggcttagcagttggtggtgcatttctctcttcagctttgaatgttctctttgataggcttgctcctcacggtgatctgctcaacatgtttcagaagcataaggatcatgttaagctcttaaagaagctggaggacattttgctcggtcttcagattgtgctaagtgatgcagagaataaacaagcatcaaatcgacatgtgagccagtggttcaataagcttcagaatgctgtggacggtgctgagaacttgatagaacaagtcaattatgaagctttgaggcttaaggtggaaggccagcatcaaaatcttgcagaaacaagcaaccagcaagtaagtgaccttaacctgtgcttcagtgatgatttcattcttaacataaaggataagttggaagaaaccattgaaacattggaggtgttggaaaagcaaattggtcgccttggcttaaaggaacgttttggttcgactaaacaagaaactagaacaccttcaacttctttagttgatgactctgatatctttggaaggcagaatgatatagaggatttgattgaccgtttattatctgaagatgcaagtggaaaaaagcggactgtagttcctattgttggaatgggtggtctgggtaagacaacacttgctaaagcggtttacaatgatgagagagtgcagatacattttggtttgaaagcttggttttgtgtttctgaggcatttgatgctttcagaataacaaaagggttacttcaagaaactggctcatttgacttgaaggctgatgacaatcttaatcagctacaagtcaaattgaaggaaagattaaagggaaagaagtttcttatagttttggatgatgtgtggaatgacaactacaacaagtgggatgaattgagaaatgtttttgtacaaggagatataggaagtaagatcattgtgacgacacgtaaagagagtgttgccttgatgatgggaaatgagcaaattagcatggacaatttgtctactgaatcctcttggtctttatttaaaacacatgcatttgaaaacatgggtcctatgggacatccggaacttgaagaggtcgggaaacaaattgcagctaagtgcaaaggactgcccttagctctgaagacgctcgctggcatgttacgctccaaatcagaggttgaagagtggaaacgtattttgagaagtgaaatatgggagctgccacacaatgacatattaccagcgttgatgttgagctacaatgatcttcccgcacatttaaagcgatgtttttccttttgtgcaatatttcctaaagattatccctttaggaaagaacaagttattcatctgtggattgccaatggtctcgtaccacaggaagatgtaataattgaagattcaggcaaccaatactttctcgagttgaggtcaagatcattattcgaaagggccccaaatccctctcaagggaacacagagaatttattcttaatgcatgaccttgtcaatgatttagcgcaaattgcatcttcaaaactttgtatcaggttggaagagagccaaggatctcatatgttggaacaaagtcaacacttatcatattcaatgggatatggtggtgagtttgagaaattgacacccctctacaaattggagcagctgaggacattgcttccgacatgtattgatctccctgattgttgtcaccatctaagcaagagggtgctacataacatactgccaagactaacatccttaagggcattatcgttgtcatgctatgagattgttgagttgccaaatgacttgtttatcaaattgaagctcctcagatttttggatatttctcggacagagattaaaaggttgccagattccatttgtgcattgtataacttagagacacttctcctgtcatcttgttatgctcttgaggagctaccgctgcagatggagaagctgattaacttgcgtcatcttgacataagcaacactcgtctcttgaagatgccgctacatctgagcaagttgaaaagcctccaagtgttagtgggagccaaatttcttataggtggtttgagaatggaagatttgggtgaagtacataacttgtacggatctctatcagttgtagagttgcaaaatgtggttgatagaagggaagctgtgaaggcaaagatgagggagaagaatcacgtcgacaggttatatttggagtggagtggaagtagtagtgccgacaattcacaaacagaaagagacatacttgatgagctacgcccccataaaaacataaaagtagtcaaaatcactggatatagagggacaaactttcccaattggctagctgatcctttgtttcttaagctggtaaaattgtctcttagaaactgcaagaactgttattcactgccagcactaggacaactcccttttctgaaattcctttcgattagagagatgcatggaataacagaggtgacggaagaattctatggcagttggtcctccaaaaagccttttaaccgtcttgagaagcttgaatttaaagatatgccggagtggaagcaatgggacctactaggaagtggagagttccctatacttgagaagcttttgattgaaaattgccctgaactcagtttggagacggtacccatccaactttcaagtttaaaaagttttgacgtaattggttctcccttggttataaactttcctttaagcatactgcccgctaccttgaagagaataaagatatctgattgccagaaattgaaattggaacagccaactggtgagattagtatgtttctggaggaattgacactgattaaatgtgattgtatagatgatataccacctgagttactcccaagagcacgcaaattgtgggtacaggattggcacaaccttactaggtttttgattcctactgccactgaaactctcgatatttggaattgtgagaatgttgaaatactttcggtggcatgtggggggacccagatgacgtcactgactattgcctactgtaagaagctgaagtggctgccagaacgtatgcaggaactccttccatctcttaaggaactgcatctgtctaattgtccagaaatagagtcctttcctgaaggtggattgcccttcaatttacaacaacttgcgatcagatattgcaagaaactggtgaacggccgaaaggagtggcatttacagagacgactctgtctcacagcgttaatcatctaccatgatggcagtgacgaagagattgttggtggtgagaattgggagttgccttcctctattcaaaggcttaccatagtgaatctgaaaacattaagcagccaacatctcaaaaacctcacctctcttcaatatctatttattaggggtaatttacctcagattcagccaatgctggaacaaggccagtgttcgcacctcacttcgcttcaaagtctacaaatctcctccctccaatcacttcctgaatcgacactgccctcctccctctctcacctggagatctcccattgccctaatctccaatcacttcctgaatcggcactgccctcctccctctctcagctgaccatcaataattgccctaatctccaatcactttccgaatcaacactgccctcctccctctctcagctggagatctccttttgccctaatctccaatatcttccactaaaagggatgccctcttccctctctgaactatctatttacaaatgcccattgctcaaaccacaactagaatttgacaagggggaatactggccaaatattgctcaatttcccaccataaagatcgatagggaatgcatgtga

SEQ ID NO: 12 - protein, 1282 aa, Artificial Sequence
  protein encoded by mutant R3a
MEIGLAVGGAFLSSALNVLFDRLAPHGDLLNMFQKHKDHVKLLKKLEDILLGLQIVLSDAENKQASNRHVSQWFNKLQNAVDGAENLIEQVNYEALRLKVEGQHQNLAETSNQQVSDLNLCFSDDFILNIKDKLEETIETLEVLEKQIGRLGLKERFGSTKQETRTPSTSLVDDSDIFGRQNDIEDLIDRLLSEDASGKKRTVVPIVGMGGLGKTTLAKAVYNDERVQIHFGLKAWFCVSEAFDAFRITKGLLQETGSFDLKADDNLNQLQVKLKERLKGKKFLIVLDDVWNDNYNKWDELRNVFVQGDIGSKIIVTTRKESVALMMGNEQISMDNLSTESSWSLFKTHAFENMGPMGHPELEEVGKQIAAKCKGLPLALKTLAGMLRSKSEVEEWKRILRSEIWELPHNDILPALMLSYNDLPAHLKRCFSFCAIFPKDYPFRKEQVIHLWIANGLVPQEDVIIEDSGNQYFLELRSRSLFERAPNPSQGNTENLFLMHDLVNDLAQIASSKLCIRLEESQGSHMLEQSQHLSYSMGYGGEFEKLTPLYKLEQLRTLLPTCIDLPDCCHHLSKRVLHNILPRLTSLRALSLSCYEIVELPNDLFIKLKLLRFLDISRTEIKRLPDSICALYNLETLLLSSCYALEELPLQMEKLINLRHLDISNTRLLKMPLHLSKLKSLQVLVGAKFLIGGLRMEDLGEVHNLYGSLSVVELQNVVDRREAVKAKMREKNHVDRLYLEWSGSSSADNSQTERDILDELRPHKNIKVVKITGYRGTNFPNWLADPLFLKLVKLSLRNCKNCYSLPALGQLPFLKFLSIREMHGITEVTEEFYGSWSSKKPFNRLEKLEFKDMPEWKQWDLLGSGEFPILEKLLIENCPELSLETVPIQLSSLKSFDVIGSPLVINFPLSILPATLKRIKISDCQKLKLEQPTGEISMFLEELTLIKCDCIDDIPPELLPRARKLWVQDWHNLTRFLIPTATETLDIWNCENVEILSVACGGTQMTSLTIAYCKKLKWLPERMQELLPSLKELHLSNCPEIESFPEGGLPFNLQQLAIRYCKKLVNGRKEWHLQRRLCLTALIIYHDGSDEEIVGGENWELPSSIQRLTIVNLKTLSSQHLKNLTSLQYLFIRGNLPQIQPMLEQGQCSHLTSLQSLQISSLQSLPESTLPSSLSHLEISHCPNLQSLPESALPSSLSQLTINNCPNLQSLSESTLPSSLSQLEISFCPNLQYLPLKGMPSSLSELSIYKCPLLKPQLEFDKGEYWPNIAQFPTIKIDRECM

SEQ ID NO: 13 - DNA, 3849 bp, Artificial Sequence
  mutant R3a
  allele (0)...(0): 2A/F11
  CDS (1)...(3849)
atggagattggcttagcagttggtggtgcatttctctcttcagctttgaatgttctctttgataggcttgctcctcacggtgatctgctcaacatgtttcagaagcataaggatcatgttaagctcttaaagaagctggaggacattttgctcggtcttcagattgtgctaagtgatgcagagaataaacaagcatcaaatcgacatgtgagccagtggttcaataagcttcagaatgctgtggacggtgctgagaacttgatagaacaagtcaattatgaagctttgaggcttaaggtggaaggccagcatcaaaatcttgcagaaacaagcaaccagcaagtaagtgaccttaacctgtgcttcagtgatgatttctttcttaacataaaggataagttggaagaaaccattgaaacattggaggtgttggaaaagcaaattggtcgccttggcttaaaggaacattttggttcgactaaacaagaaactagaacaccttcaacttctttagttgatgactctgatatctttggaaggcagaatgatatagaggatttgattgaccgtttattatctgaagatgcaagtggaaaaaagcggactgtagttcctattgttggaatgggtggtctgggtaagacaacacttgctaaagcggtttacaatgatgagagagtgcagatacattttggtttgaaagcttggttttgtgtttctgaggcatttgatgctttcagaataacaaaagggttacttcaggaaattggctcatttgacttgaaggctgatgacaatcttaatcagctacaagtcaaattgaaggaaagattaaagggaaagaagtttcttatagttttggatgatgtgtggaatgacaactacaacaagtgggatgaattgagaaatgtttttgtacaaggagatataggaagtaagatcattgtgacgacacgtaaagagagtgttgccttgatgatgggaaatgagcaaattagcatggacaatttgtctactgaatcctcttggtctttatttaaaacacatgcatttgaaaacatgggtcctatgggacatccggaacttgaagaggtcgggaaacaaattgcagctaagtgcaaaggactgcccttagctctgaagacgctcgctggcatgttacgctccaaatcagaggttgaagagtggaaacgtattttgagaagtgaaatatgggagctgccacacaatgacatattaccagcgttgatgttgagctacaatgatcttcccgcacatttaaagcgatgtttttccttttgtgcaatatttcctaaagattatccctttaggaaagaacaagttattcatctgtggattgccaatggtctcgtaccacaggaagatgtaataattgaagattcaggcaaccaatactttctcgagttgaggtcaagatcattattcgaaagggtcccaaatccttctcaagggaacacagagaatttattcttaatgcatgaccttgtcaatgatttagcgcaaattgcatcttcaaaactttgtatcaggttggaagagagccaaggatctcatatgttggaacaaagtcaacacttatcatattcaatgggatatggtggtgagtttgagaaattgacacccctctacaaattggagcagctgaggacattgcttccgacatgtattgatctccctgattgttgtcaccatctaagcaagagggtgctacataacatactgccaagactaacatccttaagggcattatcgttgtcatgctatgagattgttgagttgccaaatgacttgtttatcaaattaaagctcctcagatttttggatatttctcggacggagattaaaaggttgccagattccatttgtgcattgtataacttagagacacttctcctgtcatcttgttatgatcttgtggagctaccgctgcagatggagaagctgattaacttgcgtcatcttgacataagcaacactcgccccttgaagatgccgctacatctgagcaagttgaaaagcctccaagtgttagtgggagccaaatttcttataggtggtttgagaatggaagatttgggtgaagtacataacttgtacggatctctatcagttgtagagttgcaaaatgtggttgatagaagggaagctgtgaaggcaaagatgagggagaagaatcacgtcgacaggttatatttggagtggagtggaagtagtagtgccgacaattcacaaacagaaagagacatacttgatgagctacgcccccataaaaacataaaagtagtcaaaatcactggatatagagggacaaactttcccaattggctagctgatcctttgtttcttaagctggtaaaattgtctcttagaaactgcaagaactgttattcattgccagcactaggacaactcccttttctgaaattcctttcgattagagagatgcatggaataacagaggtgacggaagaattctatggcagttggtcctccaaaaagccttttaactgtcttgagaagcttgaatttaaagatatgccggagtggaagcaatgggacctactaggaagtggagagttccctatacttgagaagcttttgattgaaaattgccctgaactcagtttggagacggtacccatccaactttcaagtttaaaaagttttgacgtaattggttctcccttggttataaactttcctttaagcatactgcccactaccttgaagagaataaagatatctgattgccagaaattgaaattggaacagccaactggtgagattagtatgtttctggaggaattgacactgattaaatgtgattgtatagatgatatatcacctgagttactcccaagagcacgcaaattgtgggtacaggattggcacaaccttactaggtttttgattcctactgccactgaaactctcgatatttggaattgtgagaatgttgaaatactttcggtggcatgtggggggacccagatgacgtcactgactattgcctactgtaagaagctgaagtggctgccagaacgtatgcaggaactccttccatctcttaaggaactgcatctgtctaattgtccagaaatagagtcctttcctgaaggtggattgcccttcaatttacaacaacttgcgatcagatattgcaagaaactggtgaacggccgaaaggagtggcatttacagagacgactctgtctcacagcgttaatcatctaccatgatggcagtgacgaagagattgttggtggtgagaattgggagttgccttcctctattcaaaggcttaccatagtgaatctgaaaacattaagcagccaacatctcaaaaacctcacctctcttcaatatctatttattaggggtaatttacctcagattcagccaatgctggaacaaggccagtgttcgcacctcacttcgcttcaaagtctacaaatctcctccctccaatcacttcctgaatcggcactgccctcctccctctctcacctggagatctcccattgccctaatctccaatcacttcctgaatcggcactgccctcctccctctctcagctgaccatcaataattgccctaatctccaatcactttccgaatcaacactgccctcctccctctctcagctggagatctccttttgccctaatctccaatatcttccactaaaagggatgccctcttccctctctgaactatctatttacaaatgcccattgctcaaaccacaactagaatttgacaagggggaatactggccaaatattgctcaatttcccaccataaagatcgatagggaatgcatgtga

SEQ ID NO: 14 - protein, 1282 aa, Artificial Sequence
  protein encoded by mutant R3a
MEIGLAVGGAFLSSALNVLFDRLAPHGDLLNMFQKHKDHVKLLKKLEDILLGLQIVLSDAENKQASNRHVSQWFNKLQNAVDGAENLIEQVNYEALRLKVEGQHQNLAETSNQQVSDLNLCFSDDFFLNIKDKLEETIETLEVLEKQIGRLGLKEHFGSTKQETRTPSTSLVDDSDIFGRQNDIEDLIDRLLSEDASGKKRTVVPIVGMGGLGKTTLAKAVYNDERVQIHFGLKAWFCVSEAFDAFRITKGLLQEIGSFDLKADDNLNQLQVKLKERLKGKKFLIVLDDVWNDNYNKWDELRNVFVQGDIGSKIIVTTRKESVALMMGNEQISMDNLSTESSWSLFKTHAFENMGPMGHPELEEVGKQIAAKCKGLPLALKTLAGMLRSKSEVEEWKRILRSEIWELPHNDILPALMLSYNDLPAHLKRCFSFCAIFPKDYPFRKEQVIHLWIANGLVPQEDVIIEDSGNQYFLELRSRSLFERVPNPSQGNTENLFLMHDLVNDLAQIASSKLCIRLEESQGSHMLEQSQHLSYSMGYGGEFEKLTPLYKLEQLRTLLPTCIDLPDCCHHLSKRVLHNILPRLTSLRALSLSCYEIVELPNDLFIKLKLLRFLDISRTEIKRLPDSICALYNLETLLLSSCYDLVELPLQMEKLINLRHLDISNTRPLKMPLHLSKLKSLQVLVGAKFLIGGLRMEDLGEVHNLYGSLSVVELQNVVDRREAVKAKMREKNHVDRLYLEWSGSSSADNSQTERDILDELRPHKNIKVVKITGYRGTNFPNWLADPLFLKLVKLSLRNCKNCYSLPALGQLPFLKFLSIREMHGITEVTEEFYGSWSSKKPFNCLEKLEFKDMPEWKQWDLLGSGEFPILEKLLIENCPELSLETVPIQLSSLKSFDVIGSPLVINFPLSILPTTLKRIKISDCQKLKLEQPTGEISMFLEELTLIKCDCIDDISPELLPRARKLWVQDWHNLTRFLIPTATETLDIWNCENVEILSVACGGTQMTSLTIAYCKKLKWLPERMQELLPSLKELHLSNCPEIESFPEGGLPFNLQQLAIRYCKKLVNGRKEWHLQRRLCLTALIIYHDGSDEEIVGGENWELPSSIQRLTIVNLKTLSSQHLKNLTSLQYLFIRGNLPQIQPMLEQGQCSHLTSLQSLQISSLQSLPESALPSSLSHLEISHCPNLQSLPESALPSSLSQLTINNCPNLQSLSESTLPSSLSQLEISFCPNLQYLPLKGMPSSLSELSIYKCPLLKPQLEFDKGEYWPNIAQFPTIKIDRECM

SEQ ID NO: 15 - DNA, 3849 bp, Artificial Sequence
  mutant R3a
  allele (0)...(0): 3A/A10
  CDS (1)...(3849)
atggagattggcttagcagttggtggtgcatttctctcttcagctttgaatgttctctttgataggcttgctcctcacggtgatctgctcaacgtgtttcagaagcataaggatcatgttaagctcttaaagaagctggaggacattttgctcggtcttcagattgtgctaagtgatgcagagaataaacaagcatcaaatcgacatgtgagccagtggttcaataagcttcagaatgctgtggacggtgctgagaacttgatagaacaagtcaattatgaagctttgaggcttaaggtggaaggccagcatcaaaatcttgcagaaacaagcaaccagcaagtaagtaaccttaacctgtgcttcagtgatgatttctttcttaacataaaggataagttggaagaaaccattgaaacattggaggtgttggaaaagcaaattggtcgccttggcttaaaggaacattttggttcgactaaacaagaaactagaacaccttcaacttctttagttgatgactctgatacctttggaaggcagaatgatatagaggatttgattgaccgtttattatctgaagatgcaagtggaaaaaagcggactgtagttcctattgttggaatgggtggtctgggtaagacaacacttgctaaagcggtttacaatgatgagagagtgcagatacattttggtttgaaagcttggttttgtgtttctgaggcatttgatgctttcagaataacaaaagggttacttcaagaaattggctcatttgacttgaaggctgatgacaatcttaatcagctacaagtcaaattgaaggaaagattaaagggaaagaagtttcttatagttttggatgatgtgtggaatgacaactacaacaagtgggatgaattgagaaatgtttttgtacaaggagatataggaagtaagatcattgtgacgacacgtaaagagagtgttgccttgatgatgggaaatgagcaaattagcatggacaatttgtctactgaatcctcttggtctttatttaaaacacatgcatttgaaaacatgggtcctatgggacatccggaacttgaagaggtcgggaaacaaattgcagctaagtgcaaaggactgcccttagctctgaagacgctcgctggcatgttacgctccaaatcagaggttgaagagtggaaacgtattttgagaagtgaaatatgggagctgccacacaatgacatattaccagcgttgatgttgagctacaatgatcttcccgcacatttaaagcgatgtttttccttttgtgcaatatttcctaaagattatccctttaggaaagaacaagttattcatctgtggattgccaatggtctcgtaccacaggaagatgtaataattgaagattcaggcaaccaatactttctcgagttgaggtcaagatcattattcgaaagggtcccaaatccttctcaagggaacacagagaatttattcttaatgcatgaccttgtcaatgatttagcgcaaattgcatcttcaaaactttgtatcaggttggaagagagccaaggatctcatatgttggaacaaagtcaacacttatcatattcaatgggatatggtggtgagtttgagaaattgacacccctctacaaattggagcagctgaggacattgcttccgacatgtattgatctccctgattgttgtcaccatctaagcaagagggtgctacataacatactgccaagactaacatccttaagggcattatcgttgtcatgctatgagattgttgagttgccaaatgacttgtttatcaaattaaagctcctcagatttttggatatttctcggacagagattaaaaggttgccagattccatttgtgcattgtataacttagagacacttctcctgtcatcttgttatgatcttgaggagctaccgctgcagatggagaagctgattaacttgcgtcatcttgacataagcaacactcgtctcttgaagatgccgctacatctgagcaagttgaaaagcctccaagtgttagtgggagccaaatttcttataggtggtttgagaatggaagatttgggtgaagtacataacttgtacggatctctatcagttgtagagttgcaaaatgtggttgatagaagggaagctgtgaaggcaaagatgagggagaagaatcacgtcgacaggttatatttggagtggagtggaagtagtagtgccgacaattcacaaacagaaagagacatacttgatgagctacgcccccataaaaacataaaagtagtcaaaatcactggatatagagggacaaactttcccaattggctagctgatcctttgtttcttaagctggtaaaattgtctcttagaaactgcaagaactgttattcattgccagcactaggacaactcccttttctgaaattcctttcgattagagagatgcatggaataacagaggtgacggaagaattctatggcagttggtcctccaaaaagccttttaactgtcttgagaagcttgaatttaaagatatgccggagtggaagcaatgggacctactaggaagtggagagttccctatacttgagaagcttttgattgaaaattgccctgaactcagtttggagacggtacccatccaactttcaagtttaaaaagttttgacgtaattggttctcccttggttataaactttcctttaagcatactgcccactaccttgaagagaataaagatatctgattgccagaaattgaaattggagcagccaactggtgagattagtatgtttctggaggaattgacactgattaaatgtgattgtatagatgatatatcacctgagttactcccaagagcacgcaaattgtgggtacaggattggcacaaccttactaggtttttgattcctactgccactgaaactctcgatatttggaattgtgagaatgttgaaatactttcggtggcatgtggggggacccagatgacgtcactgactattgcctactgtaagaagctgaagtggctgccagaacgtatgcgggaactccttccatctcttaaggaactgcatctgtctaattgtccagaaatagagtcctttcctgaaggtggattgcccttcaatttacaacaacttgcgatcagatattgcaagaaactggtgaacggccgaaaggagtggcatttacagagacgactctgtctcacagcgttaatcatctaccatgatggcagtgacgaagagattgttggtggtgagaattgggagttgccttcctctattcaaaggcttaccatagtgaatctgaaaacattaagcagccaacatctcaaaaacctcacctctcttcaatatctatttattaggggtaatttacctcagattcagccaatgctggaacaaggccagtgttcgcacctcacttcgcttcaaagtctacaaatctcctccctccaatcacttcctgaatcggcactgccctcctccctctctcacctggagatctcccattgccctaatctccaatcacttcctgaatcggcactgccctcctccctctctcagctgaccatcaataattgccctaatctccaatcactttccgaattaacactgccctcctccctctctcagctggagatctccttttgccctaatctccaatatcttccactaaaagggatgccctcttccctctctgaactatctatttacaaatgcccattgctcaaaccacaactagaatttgacaagggggaatactggccaaatattgctcaatttcccaccataaagatcgatagggaatgcatgtga

SEQ ID NO: 16 - protein, 1282 aa, Artificial Sequence
  protein encoded by mutant R3a
MEIGLAVGGAFLSSALNVLFDRLAPHGDLLNVFQKHKDHVKLLKKLEDILLGLQIVLSDAENKQASNRHVSQWFNKLQNAVDGAENLIEQVNYEALRLKVEGQHQNLAETSNQQVSNLNLCFSDDFFLNIKDKLEETIETLEVLEKQIGRLGLKEHFGSTKQETRTPSTSLVDDSDTFGRQNDIEDLIDRLLSEDASGKKRTVVPIVGMGGLGKTTLAKAVYNDERVQIHFGLKAWFCVSEAFDAFRITKGLLQEIGSFDLKADDNLNQLQVKLKERLKGKKFLIVLDDVWNDNYNKWDELRNVFVQGDIGSKIIVTTRKESVALMMGNEQISMDNLSTESSWSLFKTHAFENMGPMGHPELEEVGKQIAAKCKGLPLALKTLAGMLRSKSEVEEWKRILRSEIWELPHNDILPALMLSYNDLPAHLKRCFSFCAIFPKDYPFRKEQVIHLWIANGLVPQEDVIIEDSGNQYFLELRSRSLFERVPNPSQGNTENLFLMHDLVNDLAQIASSKLCIRLEESQGSHMLEQSQHLSYSMGYGGEFEKLTPLYKLEQLRTLLPTCIDLPDCCHHLSKRVLHNILPRLTSLRALSLSCYEIVELPNDLFIKLKLLRFLDISRTEIKRLPDSICALYNLETLLLSSCYDLEELPLQMEKLINLRHLDISNTRLLKMPLHLSKLKSLQVLVGAKFLIGGLRMEDLGEVHNLYGSLSVVELQNVVDRREAVKAKMREKNHVDRLYLEWSGSSSADNSQTERDILDELRPHKNIKVVKITGYRGTNFPNWLADPLFLKLVKLSLRNCKNCYSLPALGQLPFLKFLSIREMHGITEVTEEFYGSWSSKKPFNCLEKLEFKDMPEWKQWDLLGSGEFPILEKLLIENCPELSLETVPIQLSSLKSFDVIGSPLVINFPLSILPTTLKRIKISDCQKLKLEQPTGEISMFLEELTLIKCDCIDDISPELLPRARKLWVQDWHNLTRFLIPTATETLDIWNCENVEILSVACGGTQMTSLTIAYCKKLKWLPERMRELLPSLKELHLSNCPEIESFPEGGLPFNLQQLAIRYCKKLVNGRKEWHLQRRLCLTALIIYHDGSDEEIVGGENWELPSSIQRLTIVNLKTLSSQHLKNLTSLQYLFIRGNLPQIQPMLEQGQCSHLTSLQSLQISSLQSLPESALPSSLSHLEISHCPNLQSLPESALPSSLSQLTINNCPNLQSLSELTLPSSLSQLEISFCPNLQYLPLKGMPSSLSELSIYKCPLLKPQLEFDKGEYWPNIAQFPTIKIDRECM

SEQ ID NO: 17 - DNA, 3849 bp, Artificial Sequence
  mutant R3a
  allele (0)...(0): 3B/B4
  CDS (1)...(3849)
atggagattggcttagcagttggtggtgcatttctctcttcagctttgaatgttctctttgataggcttgctcctcacggtgatctgctcaacatgtttcagaagcataaggatcatgttaagctcttaaagaagctggaggacattttgctcggtcttcagattgtgctaagtgatgcagagaataaacaagcatcaaatcgacatgtgagccagtggttcaataagcttcagaatgctgtggacggtgctgagaacttgatagaacaagtcaattatgaagctttgaggcttaaggtggaaggccagcatcaaaatcttgcagaaacaagcaaccagcaagtaagtgaccttaacctgtgcttcagtgatgatttctttcttaacataaaggataagttggaagaaaccattgaaacattggaggtgttggaaaagcaaattggtcgccttggcttaaaggaacgttttggttcgactaaacaagaaactagaacaccttcaacttctttagttgatgactctgatatctttggaaggcagaatgatatagaggatttgattgaccgtttattatctgaagatgcaagtggaaaaaagcggactgtagttcctattgttggaatgggtggtctgggtaagacaacacttgctaaagcggtttacaatgatgagagagtgcagatacattttggtttgaaagcttggttttgtgtttctgaggcatttgatgctttcagaataacaaaagggttacttcaagaaattggctcatttgacttgaaggctgatgacaatcttaatcagctacaagtcaaattgaaggaaagattaaagggaaagaagtttcttatagttttggatgatgtgtggaatgacaactacaacaagtgggatgaattgagaaatgtttttgtacaaggagatataggaagtaagatcattgtgacgacacgtaaagagagtgttgccttgatgatgggaaatgagcaaattagcatggacaatttgtctactgaatcctcttggtctttatttaaaacacatgcatttgaaaacatgggtcctatgggacatccggaacttgaagaggtcgggaaacaaattgcagctaagtgcaaaggactgcccttagctctgaagacgctcgctggcatgttacgctccaaaacagaggttgaagagtggaaacgtattttgagaagtgaaatatgggagctgccacacaatgacatattaccagcgttgatgttgagctacaatgatcttcccgcacatttaaagcgatgtttttccttttgtgcaatgtttcctaaagattatccccttaggaaagaacaagttattcatctgtggattgccaatggtctcgtaccacaggaagatgtaataattgaagattcaggcaaccaatactttctcgagttgaggtcaagatcattattcgaaagggtcccaaatccttctcaagggaacacagagaatttattcttaatgcatgaccttgtcaatgatttagcgcaaattgcatcttcaaaactttgtatcaggttggaagagagccaaggatctcatatgttggaacaaagtcaacacttatcatattcaatgggatatggtggtgagtttgagaaattgacacccctctacaaattggagcagctgaggacattgcttccgacatgtattgatctccctgattgttgtcaccatctaagcaagagggtgctacataacatactgccaagactaacatccttaagggcattatcgttgtcatgctatgagattgttgagttgccaaatgacttgtttatcaaattaaagctcctcagatttttggatatttctcggacagagattaaaaggttgccagattccatttgtgcattgtataacttagagtcacttctcctgtcatcttgttatgatcttgaggagctaccgctgcagatggagaagctgattaacttgcgtcatcttgacataagcaacactcgtctcttgaagatgccgctacatttgagcaagttgaaaagcctccaagtgttagtgggagccaaatttcttataggtggtttgagaatggaagatttgggtgaagtacataacttgtacggatctctatcagttgtagagttgcaaaatgtggttgatagaagggaagctgtgaaggcaaagatgagggagaagaatcacgtcgacaggttatatttggagtggggtggaagtagtagtgccgacaattcacaaacagaaagagacatacttgatgagctacgcccccataaaaacataaaagtagtcaaaatcactggatatagggggacaaactttcccaattggctagctgatcctttgtttcttaagctggtaaaattgtctcttagaaactgcaagaactgttattcattgccagcactaggacaactcccttttctgaaattcctttcgattagagagatgcatggaataacagaggtgacggaagaattctatggcagttggtcctccaaaaagccttttaactgtcttgagaagcttgaatttaaagatatgccggagtggaagcaatgggacctactaggaagtggagagttccctatacttgagaagcttttgattgaaaattgccctgaactcagtttggagacggtacccatccaactttcaagtttaaaaagttttgacgtaattggttctcccttggttataaactttcctttaagcatactgcccactaccttgaagagaataaagatatctgattgccagaaattgaaattggaacagccaactggtgagattagtatgtttctggaggaattgacactgattaaatgtgattgtatagatgatatatcacctgagttactcccaagagcacgcaaattgtgggtacaggattggcacaaccttactaggtttttgattcctactgccactgaaactctcgatatttggaattgtgagaatgttgaaatactttcggtggcatgtggggggacccagatgacgtcactgactattgcctactgtaagaagctgaagtggctgccagaacgtatgcaggaactccttccatctcttaaggaactgcatctgtctaattgtccagaaatagagtcctttcctgaaggtggattgcccttcaatttacaacaacttgcgatcagatattgcaagaaactggtgaacggccgaaaggagtggcatttacagagacgactctgtctcacagcgttaatcatctaccatgatggcagtgacgaagagattgttggtggtgagaattgggagttaccttcctctattcaaaggcttaccatagtgaatctgaaaacattaagcagccaacatctcaaaaacctcacctctcttcaatatctatttattaggggtaatttacctcagattcagccaatgctggaacaaggccagtgttcgcacctcacttcgcttcaaagtctacaaatctcctccctccaatcacttcctgaatcggcactgccctcctccctctctcacctggagatctcccattgccctaatctccaatcacttcctgaatcggcactgccctcctccctctctcagctgaccatcaataattgccctaatctccaatcactttccgaatcaacactgccctcctccctctctcagctggagatctccttttgccctaatctccaatatcttccactaaaagggatgccctcttccctctctgaactatctatttacaaatgcccattgctcaaaccacaactagaatttgacaagggggaatactggccaaatattgctcaatttcccaccataaagatcgatagggaatgcatgtga

SEQ ID NO: 18 - protein, 1282 aa, Artificial Sequence
  protein encoded by mutant R3a
MEIGLAVGGAFLSSALNVLFDRLAPHGDLLNMFQKHKDHVKLLKKLEDILLGLQIVLSDAENKQASNRHVSQWFNKLQNAVDGAENLIEQVNYEALRLKVEGQHQNLAETSNQQVSDLNLCFSDDFFLNIKDKLEETIETLEVLEKQIGRLGLKERFGSTKQETRTPSTSLVDDSDIFGRQNDIEDLIDRLLSEDASGKKRTVVPIVGMGGLGKTTLAKAVYNDERVQIHFGLKAWFCVSEAFDAFRITKGLLQEIGSFDLKADDNLNQLQVKLKERLKGKKFLIVLDDVWNDNYNKWDELRNVFVQGDIGSKIIVTTRKESVALMMGNEQISMDNLSTESSWSLFKTHAFENMGPMGHPELEEVGKQIAAKCKGLPLALKTLAGMLRSKTEVEEWKRILRSEIWELPHNDILPALMLSYNDLPAHLKRCFSFCAMFPKDYPLRKEQVIHLWIANGLVPQEDVIIEDSGNQYFLELRSRSLFERVPNPSQGNTENLFLMHDLVNDLAQIASSKLCIRLEESQGSHMLEQSQHLSYSMGYGGEFEKLTPLYKLEQLRTLLPTCIDLPDCCHHLSKRVLHNILPRLTSLRALSLSCYEIVELPNDLFIKLKLLRFLDISRTEIKRLPDSICALYNLESLLLSSCYDLEELPLQMEKLINLRHLDISNTRLLKMPLHLSKLKSLQVLVGAKFLIGGLRMEDLGEVHNLYGSLSVVELQNVVDRREAVKAKMREKNHVDRLYLEWGGSSSADNSQTERDILDELRPHKNIKVVKITGYRGTNFPNWLADPLFLKLVKLSLRNCKNCYSLPALGQLPFLKFLSIREMHGITEVTEEFYGSWSSKKPFNCLEKLEFKDMPEWKQWDLLGSGEFPILEKLLIENCPELSLETVPIQLSSLKSFDVIGSPLVINFPLSILPTTLKRIKISDCQKLKLEQPTGEISMFLEELTLIKCDCIDDISPELLPRARKLWVQDWHNLTRFLIPTATETLDIWNCENVEILSVACGGTQMTSLTIAYCKKLKWLPERMQELLPSLKELHLSNCPEIESFPEGGLPFNLQQLAIRYCKKLVNGRKEWHLQRRLCLTALIIYHDGSDEEIVGGENWELPSSIQRLTIVNLKTLSSQHLKNLTSLQYLFIRGNLPQIQPMLEQGQCSHLTSLQSLQISSLQSLPESALPSSLSHLEISHCPNLQSLPESALPSSLSQLTINNCPNLQSLSESTLPSSLSQLEISFCPNLQYLPLKGMPSSLSELSIYKCPLLKPQLEFDKGEYWPNIAQFPTIKIDRECM

SEQ ID NO: 19 - DNA, 3849 bp, Artificial Sequence
  mutant R3a
  allele (0)...(0): 3B/H1
  CDS (1)...(3849)
atggagattggcttagcagttggtggtgcatttctctcttcagctttgaatgttctctttgataggcttgctcctcacggtgatctgctcaacatgtttcagaagcataaggatcatgttaagctcttaaagaagctggaggacattttgctcggtcttcagattgtgctaagtgatgcagagaataaacaagcatcaaatcgacatgtgagccagtggttcaataagcttcagaatgctgtggacggtgctgagaacttgatagaacaagtcaattatgaagctttgaggcttaaggtggaaggccagcatcaaaatcttgcagaaacaagcaaccagcaagtaagtgaccttaacctgtgcttcagtgatgatttctttcttaacataaaggataagttggaagaaaccattgaaacattggaggtgttggaaaagcaaattggtcgccttggcttaaaggaacattttggttcgactaaacaagaaactagaacaccttcaacttctttagttgatgactctgatatctttggaaggcagaatgatatagaggatttgattgaccgtttattatctgaagatgcaagtggaaaaaagcggactgtagttcctattgttggaatgggtggtctgggtaagacaacactcgctaaagcggtttacaatgatgagagagtgcagatacattttggtttgaaagcttggttttgtgtttctgaggcatttgatgctttcagaataacaaaagggttacttcaagaaattggctcatttgacttgaaggctgatgacaatcttaatcagctacaagtcaaattgaaggaaggattaaagggaaagaagtttcttatagttttggatgatgtgtggaatgacaactacaacaagtgggatgaattgagaaatgtttttgtacaaggagatataggaagtaagatcattgtgacgacacgtaaagagagtgttgccttgatgatgggaaatgagcaaattagcatggacaatttgtctactgaatcctcttggtctttatttaaaacacatgcatttgaaaacatgggtcctacgggacatccggaacttgaagaggtcgggaaacaaattgcagctaagtgcaaaggactgcccttagctctgaagacgctcgctggcatgttacgctccaaatcagaggttgaagagtggaaacgtattttgagaagtgaaatatgggagctgccacacaatgacatattaccagcgttgatgttgagctacaatgatcttcccgcacatttaaagcgatgtttttccttttgtgcaatatttcctaaagattatccctttaggaaagaacaagttattcatctgtggattgccaatggtctcgtaccacaggaagatgtaataattgaagattcaggcaaccaatactttctcgagttgaggtcaagatcattattcgaaagggtcccaaatccttctcaagggaacacagaggatttattcttaatgcatgaccttgtcaatgatttagcgcaaattgcatcttcaaaactttgtatcaggtttgaagagagccaaggatctcatatgttggaacaaagtcaacacttatcatattcaatgggatatggtggtgagtttgagaaattgacacccctctacaaattggagcagctgaggacattgcttccgacatgtattgatctccctgattgttgtcaccatctaagcaagagggtgctacataacatactgccaagactaacatccttaagggcattatcgttgtcatgctatgagattgttgagttgccaaatgacttgtttatcaaattaaagctcctcagatttttggatatttctcggacagagattaaaaggttgccagattccatttgtgcattgtataacttagagacacttctcctgtcatcttgttatgatcttgaggagctaccgctgcagatggagaagctgattaacttgcgtcatcttgacataagcaacactcgtctcttgaagatgccgctacatctgagcaagttgaaaagcctccaagtgttagtgggagccaaatttcttataggtagtttgagaatggaagatttgggtgaagtacataacttgtacggatctctatcagttgtagagttgcaaaatgtggttgatagaagggaagctgtgaaggcaaagatgagggagaagaatcacgtcgacaggttatatttggagtggagtggaagtagtagtgccgacaattcacaaacagaaagagacatacttgatgagctacgcccccataaaaacataaaagtagtcaaaatcactggatatagagggacaaactttcccaattggctagctgatcctttgtttcttaagctggtaaaattgtctcttagaaactgcaagaactgttattcattgccagcactaggacaactcccttttctgaaattcctttcgattagagagatgcatggaataacagaggtgacggaagaattctatggcagttggtcctccaaaaagccttttaactgtcttgagaagcttgaatttaaagatatgccggagtggaagcaatgggacctactaggaagtggagagttccctatacttgagaagcttttgattgaaaattgccctgaactcagtttggagacggtacccatccaactttcaaggttaaaaagttttgacgtaattggttctcccttggttataaactttcctttaagcatactgcccactaccttgaagagaataaagatatctgattgccagaaattgaaattggaacagccaactggtgagattagtatgtttctggaggaattgacactgattaaatgtgattgtatagatgatatatcacctgagttactcccaagagcacgcaaattgtgggtacaggattggcacaaccttactaggtttctgattcctactgccactgaaactctcgatatttggaattgtgagaatgttgaaatactttcggtggcatgtggggggacccagatgacgtcactgactattgcctactgtaagaagctgaagtggctgccagaacgtatgcaggaactccttccatctcttaaggaactgcatctgtctaattgtccagaaatagagtcctttcctgaaggtggattgcccttcaatttacaacaacttgcgatcagatattgcaagaaactggtgaacggccgaaaggagtggcatttacagagacgactctgtctcacagcgttaatcatctaccatgatggcagtgacgaagagattgttggtggtgagaattgggagttgccttcctctattcaaaggcttaccatagtgaatctgaaaacattaagcagccaacatctcaaaaacctcacctctcttcaatatctatttattaggggtaatttacctcagattcagccaatgctggaacaaggccagtgttcgcacctcacttcgcttcaaagtctacaaatctcctccctccaatcacttcctgaatcggcactgccctcctccctctctcacctggagatctcccattgccctaatctccaatcacttcctgaatcggcactgccctcctccctctctcagctgaccatcaataattgccctaatctccaatcactttccgaatcaacactgccctcctccctctctcagctggagatctccttttgccctaatctccaatatcttccactaaaagggatgccctcttccctctctgaactatctatttacaaatgcccattgctcaaaccacaactagaatttgacaagggggaatactggccaaatattgctcaatttcccaccataaagatcgatagggaatgcatgtga

SEQ ID NO: 20 - protein, 1282 aa, Artificial Sequence
  protein encoded by mutant R3a
MEIGLAVGGAFLSSALNVLFDRLAPHGDLLNMFQKHKDHVKLLKKLEDILLGLQIVLSDAENKQASNRHVSQWFNKLQNAVDGAENLIEQVNYEALRLKVEGQHQNLAETSNQQVSDLNLCFSDDFFLNIKDKLEETIETLEVLEKQIGRLGLKEHFGSTKQETRTPSTSLVDDSDIFGRQNDIEDLIDRLLSEDASGKKRTVVPIVGMGGLGKTTLAKAVYNDERVQIHFGLKAWFCVSEAFDAFRITKGLLQEIGSFDLKADDNLNQLQVKLKEGLKGKKFLIVLDDVWNDNYNKWDELRNVFVQGDIGSKIIVTTRKESVALMMGNEQISMDNLSTESSWSLFKTHAFENMGPTGHPELEEVGKQIAAKCKGLPLALKTLAGMLRSKSEVEEWKRILRSEIWELPHNDILPALMLSYNDLPAHLKRCFSFCAIFPKDYPFRKEQVIHLWIANGLVPQEDVIIEDSGNQYFLELRSRSLFERVPNPSQGNTEDLFLMHDLVNDLAQIASSKLCIRFEESQGSHMLEQSQHLSYSMGYGGEFEKLTPLYKLEQLRTLLPTCIDLPDCCHHLSKRVLHNILPRLTSLRALSLSCYEIVELPNDLFIKLKLLRFLDISRTEIKRLPDSICALYNLETLLLSSCYDLEELPLQMEKLINLRHLDISNTRLLKMPLHLSKLKSLQVLVGAKFLIGSLRMEDLGEVHNLYGSLSVVELQNVVDRREAVKAKMREKNHVDRLYLEWSGSSSADNSQTERDILDELRPHKNIKVVKITGYRGTNFPNWLADPLFLKLVKLSLRNCKNCYSLPALGQLPFLKFLSIREMHGITEVTEEFYGSWSSKKPFNCLEKLEFKDMPEWKQWDLLGSGEFPILEKLLIENCPELSLETVPIQLSRLKSFDVIGSPLVINFPLSILPTTLKRIKISDCQKLKLEQPTGEISMFLEELTLIKCDCIDDISPELLPRARKLWVQDWHNLTRFLIPTATETLDIWNCENVEILSVACGGTQMTSLTIAYCKKLKWLPERMQELLPSLKELHLSNCPEIESFPEGGLPFNLQQLAIRYCKKLVNGRKEWHLQRRLCLTALIIYHDGSDEEIVGGENWELPSSIQRLTIVNLKTLSSQHLKNLTSLQYLFIRGNLPQIQPMLEQGQCSHLTSLQSLQISSLQSLPESALPSSLSHLEISHCPNLQSLPESALPSSLSQLTINNCPNLQSLSESTLPSSLSQLEISFCPNLQYLPLKGMPSSLSELSIYKCPLLKPQLEFDKGEYWPNIAQFPTIKIDRECM

SEQ ID NO: 21 - DNA, 3849 bp, Artificial Sequence
  mutant R3a
  allele (0)...(0): 3D/D3
  CDS (1)...(3849)
atggagattggcttagcagttggtggtgcatttctctcttcagctttgaatgttctctttgataggcttgctcctcacggtgatctgctcaacatgtttcagaagcataaggatcatgttaagctcttaaagaagctggaggacattttgctcggtcttcagattgtgctaagtgatgcagagaataaacaagcatcaaatcgacatgtgagccagtggttcaataagcttcagaatgctgtggacggtgctgagaacttgatagaacaagtcaattatgaagctttgaggcttaaggtggaaggccagcatcaaaatcttgcagaaacaagcaaccagcaagtaagtgaccttaacctgtgcttcagtgatgatttctttcttaacataaaggataagttggaagaaaccattgaaacattggaggtgttggaaaagcaaattggtcgccttggcttaaaggaacattttggttcgactaaacaagaaactagaacaccttcaacttctttagttgatgactctgatatctttggaaggcagaatgatatagaggatttgattgaccgtttattatctgaagatgcaagtggaaaaaagcggactgtagttcctattgttggaatgggtggtctgggtaagacaacacttgctaaagcggtttacaatgatgagagagtgcagatacattttggtttgaaagcttggttttgtgtttctgaggcatttgatgctttcagaataacaaaagggttacttcaagaaattggctcatttgacttgaaggctgatgacaatcttaatcagctacaagtcaaattgaaggaaagattaaagggaaagaagtttcttatagttttggatgatgtgtggaatgacaactacaacaagtgggatgaattgagaaatgtttttgtacaaggagatataggaagtaagatcattgtgacgacacgtaaagagagtgttgccttgatgatgggaaatgagcaaattagcatggacaatttgtctactgaatcctcttggtctttatttaaaacacatgcatttgaaaacatgggtcctatgggacatccggaacttgaagaggtcgggaaacaaattgcagctaagtgcaaaggactgcccttagctctgaagacgctcgctggcatgttacgctccaaatcagaggttgaagagtggaaacgtattttgagaagtgaaatatgggagctgccacacaatgacatattaccagcgttgatgttgagctacaatgatcttcccgcacatttaaagcgatgtttttccttttgtgcaatatttcctaaagattatccctttaggaaagaacaagttattcatctgtggattgccaatggtctcgtaccacaggaagatgtaataattgaagattcaggcaaccaatactttctcgagttgaggtcaagatcattattcgaaagggtcccaaatccttctcaagggaacacagagaatttattcttaatgcatgaccttgtcaatgatttagcgcaaattgcatcttcaaaactttgtatcaggttggaagagagccaaggatctcatatgttggaacaaagtcaacacttatcttattcaatgggatatggtggtgagtttgagaaattgacacccctctacaaattggagcagctgaggacattgcttccgacatgtattgatctccctgattgttgtcaccatctaagcaagagggtgctacataacatactgccaagactaacatccttaagggcattatcgttgtcatgctatgagattgttgagttgccaaatgacttgtttatcaaattaaagctcctcagatttttggatacttctcggacagagattaaaaggttgccagattccatttgtgcattgtataacttagagacacttctcctgtcatcttgttatgatcttgaggagctaccgctgcagatggagaagctgattaacttgcgtcatcttgacataagcaacactcgtctcttgaagatgccgctacatctgagcaagttgaaaagcctccaagtgttagtgggagccaaatttcttataggtggtttgagaatggaagatttgggtgaagtacataacttgtacggatctctatcagttgtagagttgcaaaatgtggttgatagaagggaagctgtgaaggcaaagatgagggagaagaatcacgtcgacaggttatatttggagtggagtggaagtagtagtgccgacaattcacaaacagaaagagacatacttgatgagctacgcccccataaaaacataaaagtagtcaaaatcactggatatagagggacaaactttcccaattggctagctgatcctttgtttcttaagctggtaaaattgtctcttagaaactgcaagaactgttattcattgccggcactaggacaactcccttttctgaaattcctttcgattagagagatgcatggaataacagaggtgacggaagaattctatggcagttggtcctccaaaaagccttttaactgtcttgagaagcttgaatttaaagatatgccggagtggaagcaatgggacctactaggaagtggagagttccctatacttgagaagcttttgattgaagattgccctgaactcagtttggagacggtacccatccaactttcaagtttaaaaagttttgacgtaattggttctcccttggttataaactttcctttaagcatactgcccactaccttgaagagaataaagatatctgattgccagaaattgaaatcggaaccgccaactggtgagattagtatgtttctggaggaattgacactgattaaatgtgattgtatagatgatataccacctgagttactcccaagagcacgcaaattgtgggtacaggattggcacaaccttactaggtttttgattcctactgccactaaaactctcgatatttggaattgtgagaatgttgaaatactttcggtggcatgtggggggacccagatgacgtcactgactattgcctactgtaagaagctgaagtggctgccagaacgtatgcaggaactccttccatctcttaaggaactgcatctgtctaattgtccagaaatagagtcctttcctgaaggtggattgcccttcaatttacaacaacttgcgatcagatattgcaagaaactggtgaacggccgaaaggagtggcatttacagagacgactctgtctcacagcgttaatcatctaccatgatggcagtgacgaagagattgttggtggtgagaattgggagttgccttcctctattcaaaggcttaccatagtgaatctgaaaacattaagcagccaacatctcaaaaacctcacctctcttcaatatctatttattaggggtaatttacctcagattcagccaatgctggaacaaggccagtgttcgcacctcacttcgcttcaaagtctacaaatctcctccctccaatcacttcctgaatcggcactgccctcctccctctctcacctggagatctcccattgccctaatctccaatcacttcctgaatcggcactgccctcctccctctctcagctgaccatcaataattgccctaatctccaatcactttccgaatcaacactgccctcctccctctctcagctggagatctccttttgccctaatctccaatatcttccactaaaagggatgccctcttccctctctgaactatctatttacaaatgcccattgctcaaaccacaactagaatttgacaagggggaatactggccaaatattgctcaatttcccaccataaagatcgatagggaatgcatgtga

SEQ ID NO: 22 - protein, 1282 aa, Artificial Sequence
  protein encoded by mutant R3a
MEIGLAVGGAFLSSALNVLFDRLAPHGDLLNMFQKHKDHVKLLKKLEDILLGLQIVLSDAENKQASNRHVSQWFNKLQNAVDGAENLIEQVNYEALRLKVEGQHQNLAETSNQQVSDLNLCFSDDFFLNIKDKLEETIETLEVLEKQIGRLGLKEHFGSTKQETRTPSTSLVDDSDIFGRQNDIEDLIDRLLSEDASGKKRTVVPIVGMGGLGKTTLAKAVYNDERVQIHFGLKAWFCVSEAFDAFRITKGLLQEIGSFDLKADDNLNQLQVKLKERLKGKKFLIVLDDVWNDNYNKWDELRNVFVQGDIGSKIIVTTRKESVALMMGNEQISMDNLSTESSWSLFKTHAFENMGPMGHPELEEVGKQIAAKCKGLPLALKTLAGMLRSKSEVEEWKRILRSEIWELPHNDILPALMLSYNDLPAHLKRCFSFCAIFPKDYPFRKEQVIHLWIANGLVPQEDVIIEDSGNQYFLELRSRSLFERVPNPSQGNTENLFLMHDLVNDLAQIASSKLCIRLEESQGSHMLEQSQHLSYSMGYGGEFEKLTPLYKLEQLRTLLPTCIDLPDCCHHLSKRVLHNILPRLTSLRALSLSCYEIVELPNDLFIKLKLLRFLDTSRTEIKRLPDSICALYNLETLLLSSCYDLEELPLQMEKLINLRHLDISNTRLLKMPLHLSKLKSLQVLVGAKFLIGGLRMEDLGEVHNLYGSLSVVELQNVVDRREAVKAKMREKNHVDRLYLEWSGSSSADNSQTERDILDELRPHKNIKVVKITGYRGTNFPNWLADPLFLKLVKLSLRNCKNCYSLPALGQLPFLKFLSIREMHGITEVTEEFYGSWSSKKPFNCLEKLEFKDMPEWKQWDLLGSGEFPILEKLLIEDCPELSLETVPIQLSSLKSFDVIGSPLVINFPLSILPTTLKRIKISDCQKLKSEPPTGEISMFLEELTLIKCDCIDDIPPELLPRARKLWVQDWHNLTRFLIPTATKTLDIWNCENVEILSVACGGTQMTSLTIAYCKKLKWLPERMQELLPSLKELHLSNCPEIESFPEGGLPFNLQQLAIRYCKKLVNGRKEWHLQRRLCLTALIIYHDGSDEEIVGGENWELPSSIQRLTIVNLKTLSSQHLKNLTSLQYLFIRGNLPQIQPMLEQGQCSHLTSLQSLQISSLQSLPESALPSSLSHLEISHCPNLQSLPESALPSSLSQLTINNCPNLQSLSESTLPSSLSQLEISFCPNLQYLPLKGMPSSLSELSIYKCPLLKPQLEFDKGEYWPNIAQFPTIKIDRECM

SEQ ID NO: 23 - DNA, 3849 bp, Artificial Sequence
  mutant R3a
  allele (0)...(0): 4B/E10
  CDS (1)...(3849)
atggagattggcttagcagttggtggtgcatttctctcttcagctttgaatgttctctttgataggcttgctcctcacggtgatctgctcaacatgtttcagaagcataaggatcatgttaagctcttaaagaagctggaggacattttgctcggtcttcagattgtgctaagtgatgcagagaataaacaagcatcaaatcgacatgtgagccagtggttcaataagcttcagaatgctgtggacggtgctgagaacttgatagaacaagtcaattatgaagctttgaggcttaaggtggaaggccagcatcaaaatcttgcagaaacgagcaaccagcaagtaagtgaccttaacctgtgcttcagtgatgatttctttcttaacataaaggataagttggaagaaaccattgaaacattggaggtgttggaaaagcaaattggtcgccttggcttaaaggaacattttggttcgactaaacaagaaactagaacaccttcaacttctttagttgatgactctgatatctttggaaggcagaatgatgtagaggatttgattgaccgtttattatctgaagatgcaagtggaaaaaagcggactgtagttcctattgttggaatgggtggtctgggtaagacaacacttgctaaagcggtttacaatgatgagagagtgcagatacattttggtttgaaagcttggttttgtgtttctgaggcatttgatgctttcagaataacaaaagggttacttcaagaaattggctcatttgacttgaaggctgatgacaatcttaatcagctacaagtcaaattgaaggaaagattaaagggaaagaagtttcttatagttttggatgatgtgtggaatgacaactacaacaagtgggatgaattgagaaatgtttttgtacaaggagatataggaagtaagatcattgtgacgacacgtaaagagagtgttgccttgatgatgggaaatgagcaaattagcatggacaatttgtctactgaatcctcttggtctttatttaaaacacatgcatttgaaaacatgggtcctatgggacatccggaacttgaagaggtcgggaaacaaattgcagctaagtgcaaaggactgcccttagctctgaagacgctcgctggcatgttacgctccaaatcagaggttgaagagtggaaacgtattttgagaagtgaaatatgggagctgccacacaatgacatattaccagcgttgatgttgagctacaatgatcttcccgcacatttaaagcgatgtttttccttttgtgcaatatttcctaaagattatccctttaggaaagaacaagttattcatctgtggattgccaatggtctcgtaccacaggaagatgtaataattgaagattcaggcaaccaatactttctcgagttgaggtcaagatcattattcgaaagggtcccaaatccttctcaagggaacacagagaatttattcttaatgcatgaccttgtcaatgatttagcgcaaattgcatcttcaaaactttgtatcaggttggaagagagccaaggatctcatatgttggaacaaagtcaacacttatcatattcaatgggatatggtggtgagtttgagaaattgacacccctctacaaattggagcagctgaggacattgcttccgacatgtattgatctccctggttgttgtcaccatctaagcaagagggtgctacataacatactgccaagactaacatccttaagggcattatcgttgtcatgctatgagattgttgagttgccaaatgacttgtttatcaaattaaagctcctcagatttttggatatttctcggacagagattaaaaggttgccagattccatttgtgcattgtataacttagagacacttctcctgtcatcttgttatgatcttgaggagctaccgctgcagatggagaagctgattaacttgcgtcatcttgacataagcaacactcgtctcttgaagatgccgctacatctgagcaagttgaaaagcctccaagtgttagtgggagccaaatttcttataggtggtttgagaatggaagatttgggtgaagtacataacttgtacggatctctatcagttgtagagttgcaaaatgtggttgatagaagggaagctgtgaaggcaaagatgagggagaagaatcacgtcgacaggttatatttggagtggagtggaagtagtagtgccgacaattcacaaacagaaagagacatacttgatgagctacgcccccataaaaacataaaagtagtcaaaatcactggatatagagggacaaactttcccaattggctagctgatcctttgtttcttaagctggtaaaattgtctcttagaaactgcaagaactgttattcattgccagcactaggacaactcccttttctgaaattcctttcgattagagagatgcatggaataacagaggtgacggaagaattctatggcagttggtcctccaaaaagccttttaactgtcttgagaagcttgaatttaaagatatgccggagtggaagcaatgggacctactaggaagtggagagttccctatacttgagaagcttttgattgaaaattgccctgaactcagtttggagacggtacccatccaactttcaagtttaaaaagttttgacgtaattggttctcccttggttataaactttcctttaagcatactgcccactaccttgaagagaataaagatatctgattgccagaaattgaaattggaacagccaactggtgagactagtatgtttctggaggaattgacactgattaaatgtgattgtatagatgatatatcacctgagttactcccaagagcacgcaaattgtgggtacaggattggcacaaccttactaggtttttgattcctactgccactgaaactctcgatatttggaattgtgagaatgttgaaatactttcggtggcatgtggggggacccagatgacgtcactgactattgcctactgtaagaagctgaagtggctgccagaacgtatgcaggaactccttccatctcttaaggaactgcatctgtctaattgtccagaaatagagtcctttcctgaaggtggattgcccttcaatttacaacaacttgcgatcagatattgcaagaaactggtgaacggccgaaaggagtggcatttacagagacgactctgtctcacagcgttaatcatctaccatgatggcagtgacgaagagattgttggtggtgagaattgggagttgccttcctctattcaaaggcttaccatagtgaatctgaaaacattaagcagccaacatctcaaagacctcacctctcttcaatatctatttattaggggtaatttacctcagattcagccaatgctggaacaaggccagtgttcgcacctcacttcgcttcaaagtctacaaatctcctccctccaatcacttcctgaatcggcactgccctcctccctctctcacctggagatctcccattgccctaatctccaatcacttcctgaatcggcactgccctcctccctctctcagctgaccatcaataattgccctaatctccaatcactttccgaatcaacactgccctcctccctctctcagctggagatctccttttgccctaatctccaatatcttccactaaaagggatgccctcttccctctctgaactatctatttacaaatgcccattgctcaaaccacaactagaatttgacaagggggaatactggccaaatattgctcaatttcccaccataaagatcgatagggaatgcatgtga

SEQ ID NO: 24 - protein, 1282 aa, Artificial Sequence
  protein encoded by mutant R3a
MEIGLAVGGAFLSSALNVLFDRLAPHGDLLNMFQKHKDHVKLLKKLEDILLGLQIVLSDAENKQASNRHVSQWFNKLQNAVDGAENLIEQVNYEALRLKVEGQHQNLAETSNQQVSDLNLCFSDDFFLNIKDKLEETIETLEVLEKQIGRLGLKEHFGSTKQETRTPSTSLVDDSDIFGRQNDVEDLIDRLLSEDASGKKRTVVPIVGMGGLGKTTLAKAVYNDERVQIHFGLKAWFCVSEAFDAFRITKGLLQEIGSFDLKADDNLNQLQVKLKERLKGKKFLIVLDDVWNDNYNKWDELRNVFVQGDIGSKIIVTTRKESVALMMGNEQISMDNLSTESSWSLFKTHAFENMGPMGHPELEEVGKQIAAKCKGLPLALKTLAGMLRSKSEVEEWKRILRSEIWELPHNDILPALMLSYNDLPAHLKRCFSFCAIFPKDYPFRKEQVIHLWIANGLVPQEDVIIEDSGNQYFLELRSRSLFERVPNPSQGNTENLFLMHDLVNDLAQIASSKLCIRLEESQGSHMLEQSQHLSYSMGYGGEFEKLTPLYKLEQLRTLLPTCIDLPGCCHHLSKRVLHNILPRLTSLRALSLSCYEIVELPNDLFIKLKLLRFLDISRTEIKRLPDSICALYNLETLLLSSCYDLEELPLQMEKLINLRHLDISNTRLLKMPLHLSKLKSLQVLVGAKFLIGGLRMEDLGEVHNLYGSLSVVELQNVVDRREAVKAKMREKNHVDRLYLEWSGSSSADNSQTERDILDELRPHKNIKVVKITGYRGTNFPNWLADPLFLKLVKLSLRNCKNCYSLPALGQLPFLKFLSIREMHGITEVTEEFYGSWSSKKPFNCLEKLEFKDMPEWKQWDLLGSGEFPILEKLLIENCPELSLETVPIQLSSLKSFDVIGSPLVINFPLSILPTTLKRIKISDCQKLKLEQPTGETSMFLEELTLIKCDCIDDISPELLPRARKLWVQDWHNLTRFLIPTATETLDIWNCENVEILSVACGGTQMTSLTIAYCKKLKWLPERMQELLPSLKELHLSNCPEIESFPEGGLPFNLQQLAIRYCKKLVNGRKEWHLQRRLCLTALIIYHDGSDEEIVGGENWELPSSIQRLTIVNLKTLSSQHLKDLTSLQYLFIRGNLPQIQPMLEQGQCSHLTSLQSLQISSLQSLPESALPSSLSHLEISHCPNLQSLPESALPSSLSQLTINNCPNLQSLSESTLPSSLSQLEISFCPNLQYLPLKGMPSSLSELSIYKCPLLKPQLEFDKGEYWPNIAQFPTIKIDRECM

SEQ ID NO: 25 - DNA, 3849 bp, Artificial Sequence
  mutant R3a
  allele (0)...(0): 4D/B3
  CDS (1)...(3849)
atggagattggcttagcagttggtggtgcatttctctcttcagctttgaatgttctctttgataggcttgctcctcacggtgatctgctcaacatgtttcagaagcataaggatcatgttaagctcttaaggaagctggaggacattttgctcggtcttcagattgtgctaagtgatgcagagaataaacaagcatcaaatcgacatgtgagccagtggttcaataagcttcagaatgctgtggacggtgctgagaacttgatagaacaagtcaattatgaagctttgaggcttaaggtggaaggccagcatcaaaatcttgcagaaacaagcaaccagcaagtaagtgaccttaacctgtgcttcagtgatgatttctttcttaacataaaggataagttggaagaaaccattgaaacattggaggtgttggaaaagcaaattggtcgccttggcttaaaggaacattttggttcgactaaacaagaaactagaacaccttcaacttctttagttgatgactctgatatctttggaaggcagaatgatatagaggatttgattgaccgtttattatctgaagatgcaagtggaaaaaagcggactgtagttcctattgttggaatgggtggtctgggtaagacaacacttgctaaagcggtttacaatgatgagagagtgcagatacattttggtttgaaagcttggttttgtgtttctgaggcatttgatgctttcagaataacaaaagggttacttcaagaaattggctcatttgacttgaaggctgatgacaatcttaatcagctacaagtcaaattgaaggaaagattaaagggaaagaagtttcttatagttttggatgatgtgtggaatgacaactacaacaagtgggatgaattgagaaatgtttttgtacaaggagatataggaagtaagatcattgtgacgacacgtaaagagagtgttgccttgatgatgggaaatgagcaaattagcatggacaatttgtctactgaatcctcttggtctttatttaaaacacatgcatttgaaaacatgggtcctatgggacatccggaacttgaagaggtcgggaaacaaattgcagctaagtgcaaaggactgcccttagctctgaagacgctcgctggcatgttacgctccaaatcagaggttgaagagtggaaacgtattttgagaagtgaaatatgggagctgccacacaatgacatattaccagcgttgatgttgagctacaatgatcttcccgcacatttaaagcgatgtttttccttttgtgcaatatttcctaaagattatccctttaggaaagaacaagttattcatctgtggattgccaatggtctcgtaccacaggaagatgtaataattgaagattcaggcaaccaatactttctcgagttgaggtcaagatcattattcgaaagggtcccaaattcttctcaagggaacacagagaatttattcttaatgcatgaccttgtcaatgatttagcgcaaattgcatcttcaaaactttgtatcaggttggaagagagccaaggatctcatatgttggaacaaagtcaacacttatcatattcaatgggatatggtggtgagtttgagaaattgacacccctctacaaattggagcagctgaggacattgcttccgacatgtattgatctccctgattgttgtcaccatctaagcaagagggtgctacataacatactgccaagactaacatccttaagggcattatcgttgtcatgctatgagattgttgagttgccaaatgacttgtttatcaaattaaagctcctcagatttttggatatttctcggacagagattaaaaggttgccagattccatttgtgcattgtataacttagagacacttctcctgtcatcttgttatgatcttgaggagctaccgctgcagatggagaagctgattaacttgcgtcatcttgacataagcaacactcgtctcttgaagatgccgctacatctgagcaagttgaaaagcctccaagtgttagtgggagccaaatttcttataggtggtttgagaatggaagatttgggtgaagtacataacttgtacggatctctatcagttgtagagttgcaaaatgtggttgatagaagggaagctgtgaaggcaaagatgagggagaagaatcacgtcgacaggttatatttggagtggagtggaagtagtagtgccgacaattcacaaacagaaagagacatacttgatgagctacgcccccataaaaacataaaagtagtcaaaatcactggatatagagggacaaactttcccaattggctagctgatcctttgtttcttaagctggtaaaattgtctcttagaaactgcaagaactgttattcattgccagcactaggacaactcccttttctgaaattcctttcgattagagagatgcatggaataacagaggtgacggaagaattctatggcagttggtcctccaaaaagccttttaactgtcttgagaagcttgaatttaaagatatgccggagtggaagcaatgggacctactaggaagtggagagttccctatacttgagaagcttttgattgaaaattgccctgaactcagtttggagacggtacccatccaactttcaagtttaaaaagttttgacgtaattggttctcccttggttataaactttcctttaagcatactgcccactaccttgaagagaataaagatatctgattgccagaaattgaaattggaacagccaactggtgagattagtatgtttctggaggaattgacactgattaaatgtgattgtatagatgatatatcacctgagttactcccaagagcacgcaaattgtgggtacaggattggcacaaccttactaggtttttgattcctactgccactgaaactctcgatatttggaattgtgagaatgttgaaatactttcggtggcatgtggggggacccagatgacgtcactgactattgcctactgtaagaagctgaagtggctgccagaacgtatgcaggaactccttccatctcttaaggaactgcatctgtctaattgtccagaaatagagtcctttcctgaaggtggattgcccttcaatttacaacaacttgcgatcagatattgcaagaaactggtgaacggccgaaaggagtggcatttacagagacgactctgtctcacagcgttaatcatctaccatgatggcagtgacgaagagattgttggtggtgagaattgggagttgccttcctctattcaaaggcttaccatagtgaatctgaaaacattaagcagccaacatctcaaaaacctcacctctcttcaatatctatttattaggggtaatttacctcagattcagccaatgctggaacaaggccagtgttcgcacctcacttcgcttcaaagtctacaaatctcctccctccaatcacttcctgaatcggcactgccctcctccctctctcacctggagatctcccattgccctaatctccaatcacttcctgaatcggcactgccctcctccctctctcagctgaccatcaataattgccctaatctccaatcactttccgaatcaacactgccctcctccctctctcagctggagatctccttttgccctaatctccaatatcttccactaaaagggatgccctcttccctctctgaactatctatttacaaatgcccattgctcaaaccacaactagaatttgacaagggggaatactggccaaatattgctcaatttcccaccataaagatcgatagggaatgcatgtga

SEQ ID NO: 26 - protein, 1282 aa, Artificial Sequence
  protein encoded by mutant R3a
MEIGLAVGGAFLSSALNVLFDRLAPHGDLLNMFQKHKDHVKLLRKLEDILLGLQIVLSDAENKQASNRHVSQWFNKLQNAVDGAENLIEQVNYEALRLKVEGQHQNLAETSNQQVSDLNLCFSDDFFLNIKDKLEETIETLEVLEKQIGRLGLKEHFGSTKQETRTPSTSLVDDSDIFGRQNDIEDLIDRLLSEDASGKKRTVVPIVGMGGLGKTTLAKAVYNDERVQIHFGLKAWFCVSEAFDAFRITKGLLQEIGSFDLKADDNLNQLQVKLKERLKGKKFLIVLDDVWNDNYNKWDELRNVFVQGDIGSKIIVTTRKESVALMMGNEQISMDNLSTESSWSLFKTHAFENMGPMGHPELEEVGKQIAAKCKGLPLALKTLAGMLRSKSEVEEWKRILRSEIWELPHNDILPALMLSYNDLPAHLKRCFSFCAIFPKDYPFRKEQVIHLWIANGLVPQEDVIIEDSGNQYFLELRSRSLFERVPNSSQGNTENLFLMHDLVNDLAQIASSKLCIRLEESQGSHMLEQSQHLSYSMGYGGEFEKLTPLYKLEQLRTLLPTCIDLPDCCHHLSKRVLHNILPRLTSLRALSLSCYEIVELPNDLFIKLKLLRFLDISRTEIKRLPDSICALYNLETLLLSSCYDLEELPLQMEKLINLRHLDISNTRLLKMPLHLSKLKSLQVLVGAKFLIGGLRMEDLGEVHNLYGSLSVVELQNVVDRREAVKAKMREKNHVDRLYLEWSGSSSADNSQTERDILDELRPHKNIKVVKITGYRGTNFPNWLADPLFLKLVKLSLRNCKNCYSLPALGQLPFLKFLSIREMHGITEVTEEFYGSWSSKKPFNCLEKLEFKDMPEWKQWDLLGSGEFPILEKLLIENCPELSLETVPIQLSSLKSFDVIGSPLVINFPLSILPTTLKRIKISDCQKLKLEQPTGEISMFLEELTLIKCDCIDDISPELLPRARKLWVQDWHNLTRFLIPTATETLDIWNCENVEILSVACGGTQMTSLTIAYCKKLKWLPERMQELLPSLKELHLSNCPEIESFPEGGLPFNLQQLAIRYCKKLVNGRKEWHLQRRLCLTALIIYHDGSDEEIVGGENWELPSSIQRLTIVNLKTLSSQHLKNLTSLQYLFIRGNLPQIQPMLEQGQCSHLTSLQSLQISSLQSLPESALPSSLSHLEISHCPNLQSLPESALPSSLSQLTINNCPNLQSLSESTLPSSLSQLEISFCPNLQYLPLKGMPSSLSELSIYKCPLLKPQLEFDKGEYWPNIAQFPTIKIDRECM

SEQ ID NO: 27 - DNA, 3849 bp, Artificial Sequence
  mutant R3a
  allele (0)...(0): 4D/D10
  CDS (1)...(3849)
atggagattggcttagcagttggtggtgcatttctctcttcagctttgaatgttctctttgataggcttgctcctcacggggatctgctcaacatgtttcagaagcataaggatcatgttaagctcttaaagaagctggaggacattttgctcggtcttcagattgtgctaagtgatgcagagaataaacaagcatcaaatcgacatgtgagccagtggttcaataagcttcagaatgctgtggacggtgctgagaacttgatagaacaagtcaattatgaagctttgaggcttaaggtggaaggccagcatcaaaatcttgcagaaacaagcaaccagcaagtaagtgaccttaacctgtgcttcagtgatgatttctttcttaacataaaggataagttggaagaaaccattgaaacattggaggtgttggaaaagcaaattggtcgccttggcttaaaggaacattttggttcgactaaacaagaaactagaacaccttcaacttctttagttgatgactctgatatctttggaaggcagaatgatatagaggatttgattgaccgtttattatctgaagatgcaagtggaaaaaagcggactgtagttcctattgttggaatgggtggtctgggtaagacaacacttgctaaagcggtttacaatgatgagagagtgcagatacattttggtttgaaagcttggttttgtgtttctgaggcatttgatgctttcagaataacaaaagggttacttcaagaaattggctcatttgacttgaaggctgatgacaatcttaatcagctacaagtcaaattgaaggaaagattaaagggaaagaagtttcttatagttttggatgatgtgtggaatgacaactacaacaagtgggatgaattgagaaatgtttttgtacaaggagatataggaagtaagatcattgtgacgacacgtaaagagagtgttgccttgatgatgggaaatgagcaaattagcatggacaatttgtctactgaatcctcttggtctttatttaaaacacatgcatttgaaaacatgggtcctatgggacatccggaacttgaagaggtcgggaaacaaattgcagctaagtgcaaaggactgcccttagctctgaagacgctcgctggcatgttacgctccaaatcagaggttgaagagtggaaacgtattttgagaagtgaaatatgggagctgccacacaatgacatattaccagcgttgatgttgagctacaatgatcttcccgcacatttaaagcgatgtttttccttttgtgcaatatttcctaaagattatccctttaggaaagaacaagttattcatctgtggattgccaatggtctcgtaccacaggaagatgtaataattgaagattcaggcaaccaatactttctcgagttgaggtcaagatcattattcgaaagggtcccaaatccttctcaagggaacacagagaatttattcttaatgcatgaccttgtcaatgatttagcgcaaattgcatcttcaaaactttgtatcaggttggaagagagccaaggatctcatatgttggaacaaagtcaacacttatcatattcaatgggatatggtggtgagtttgagaaattgacacccctctacaaattggagcagctgaggacattgcttccgacatgtattgatctccctgattgttgtcaccatcttagcaagagggtgctacataacatactgccaagactaacatccttaagggcattatcgttgtcatgctatgagattgttgagttgccaaatgacttgtttatcaaattaaagctcctcagatttttggatatttctcggacagagattaaaaggttgccagattccatttgtgcattgtataacttagagacacttctcctgtcatcttgttatgatcttgaggagctaccgctgcagatggagaagctgattaacttgcgtcatcttgacataagcaacactcgtctcttgaagatgccgctacatctgagcaagttgaaaagcctccaagtgttagtgggagccaaatttcttataggtggtttgagaatggaagatttgggtgaagtacataacttgtacggatctctatcagttgtagagttgcaaaatgtggttgatagaagggaagctgtgaaggcaaagatgagggagaagaatcacgtcgacaggttatatttggagtggagtggaagtagtagtgccgacaattcacaaacagaaagagacatacttgatgagctacgcccccataaaaacataaaagtagtcaaaatcactggatatagagggacaaactttcccaattggctagctgatcctttgtttcttaagctggtaaaattgtctcttagaaactgcaagaactgttattcattgccagcactaggacaactcccttttctgaaattcctttcgattagagagatgcatggaataacagaggtgacggaagaattctatggcagttggtcctccaaaaagccttttaactgtcttgagaagcttgaatttaaagatatgccggagtggaagcaatgggacctactaggaagtggagagttccctatacttgagaagcttttgattgaaaattgccctgaactcagtttggagacggtacccatccaactttcaagtttaaaaagttttgacgtaattggttctcccttggttataaactttcctttaagcatactgcccactaccttgaagagaataaagatatctgattgccagaaattgaaattggaacagccaactggtgagattagtatggttctggaggaattgacactgattaaatgtgattgtatagatgatatatcacctgagttactcccaagagcacgcaaattgtgggtacaggattggcacaaccttactaggtttttgattcctactgccactgaaactctcgatatttggaattgtgagaatgttgaaatactttcggtggcatgtggggggacccagatgacgtcactgactattgcctactgtaagaagctgaagtggctgccagaacgtatgcaggaactccttccatctcttaaggaactgcatctgtctaattgtccagaaatagagtcctttcctgaaggtggattgcccttcaatttacaacaacttgcgatcagatattgcaagaaactggtgaacggccgaaaggagtggcatttacagagacgactctgtctcacagcgttaatcatctaccatgatggcagtgacgaagagattgttggtggtgagaattgggagttgccttcctctattcaaaggcttaccatagtgaatctgaaaacattaagcagccaacatctcaaaaacctcacctctcttcaatatctatttattaggggtaatttacctcagattcagccaatgctggaacaaggccagtgttcgcacctcacttcgcttcaaagtctacaaatctcctccctccaatcacttcctgaatcggcactgccctcctccctctctcacctggagatctcccattgccctaatctccaatcacttcctgaatcggcactgccctcctccctctctcagctgaccatcaataattgccctaatctccaatcactttccgaatcaacactgccctcctccctctctcagctggagatctccttttgccctaatctccaatatcttccactaaaagggatgccctcttccctctctgaactatctatttacaaatgcccattgctcaaaccacaactagaatttgacaagggggaatactggccaaatattgctcaatttcccaccataaaggtcgatagggaatgcatgtga

SEQ ID NO: 28 - protein, 1282 aa, Artificial Sequence
  protein encoded by mutant R3a
MEIGLAVGGAFLSSALNVLFDRLAPHGDLLNMFQKHKDHVKLLKKLEDILLGLQIVLSDAENKQASNRHVSQWFNKLQNAVDGAENLIEQVNYEALRLKVEGQHQNLAETSNQQVSDLNLCFSDDFFLNIKDKLEETIETLEVLEKQIGRLGLKEHFGSTKQETRTPSTSLVDDSDIFGRQNDIEDLIDRLLSEDASGKKRTVVPIVGMGGLGKTTLAKAVYNDERVQIHFGLKAWFCVSEAFDAFRITKGLLQEIGSFDLKADDNLNQLQVKLKERLKGKKFLIVLDDVWNDNYNKWDELRNVFVQGDIGSKIIVTTRKESVALMMGNEQISMDNLSTESSWSLFKTHAFENMGPMGHPELEEVGKQIAAKCKGLPLALKTLAGMLRSKSEVEEWKRILRSEIWELPHNDILPALMLSYNDLPAHLKRCFSFCAIFPKDYPFRKEQVIHLWIANGLVPQEDVIIEDSGNQYFLELRSRSLFERVPNPSQGNTENLFLMHDLVNDLAQIASSKLCIRLEESQGSHMLEQSQHLSYSMGYGGEFEKLTPLYKLEQLRTLLPTCIDLPDCCHHLSKRVLHNILPRLTSLRALSLSCYEIVELPNDLFIKLKLLRFLDISRTEIKRLPDSICALYNLETLLLSSCYDLEELPLQMEKLINLRHLDISNTRLLKMPLHLSKLKSLQVLVGAKFLIGGLRMEDLGEVHNLYGSLSVVELQNVVDRREAVKAKMREKNHVDRLYLEWSGSSSADNSQTERDILDELRPHKNIKVVKITGYRGTNFPNWLADPLFLKLVKLSLRNCKNCYSLPALGQLPFLKFLSIREMHGITEVTEEFYGSWSSKKPFNCLEKLEFKDMPEWKQWDLLGSGEFPILEKLLIENCPELSLETVPIQLSSLKSFDVIGSPLVINFPLSILPTTLKRIKISDCQKLKLEQPTGEISMVLEELTLIKCDCIDDISPELLPRARKLWVQDWHNLTRFLIPTATETLDIWNCENVEILSVACGGTQMTSLTIAYCKKLKWLPERMQELLPSLKELHLSNCPEIESFPEGGLPFNLQQLAIRYCKKLVNGRKEWHLQRRLCLTALIIYHDGSDEEIVGGENWELPSSIQRLTIVNLKTLSSQHLKNLTSLQYLFIRGNLPQIQPMLEQGQCSHLTSLQSLQISSLQSLPESALPSSLSHLEISHCPNLQSLPESALPSSLSQLTINNCPNLQSLSESTLPSSLSQLEISFCPNLQYLPLKGMPSSLSELSIYKCPLLKPQLEFDKGEYWPNIAQFPTIKVDRECM

SEQ ID NO: 29 - DNA, 3849 bp, Artificial Sequence
  mutant R3a
  allele (0)...(0): 6A/E5
  CDS (1)...(3849)
atggagattggcttagcagttggtggtgcatttctctcttcagctttgaatgttctctttgataggcttgctcctcacggtgatctgctcaacatgtttcagaagcataaggatcatgttaagctcttaaagaagctggaggacattttgctcggtcttcagattgtgctaagtgatgcagagaataaacaagcatcaaatcgacatgtgagccagtggttcaataagcttcagaatgctgtggacggtgctgagaacttgatagaacaagtcaattatgaagctttgaggcttaaggtggaaggccagcatcaaaatcttgcagaaacaagcaaccagcaagtaagtgaccttaacctgtgcttcagtgatgatttctttcttaacataaaggataagttggaagaaaccattgaaacattggaggtgttggaaaagcaaattggtcgccttggcttaaaggaacattttggttcgactaaacaagaaactagaacaccttcaacttctttagttgatgactctgatatctttggaaggcagaatgatatagaggatttgattgaccgtttattatctgaagatgcaagtggaaaaaagcggactgtagttcctattgttggaatgggtggtctgggtaagacaacacttgctaaagcggtttacaatgatgagagggtgcagatacattttggtttgaaagcttggttttgtgtttctgaggcatttgatgctttcagaataacaaaagggttacttcaagaaattggctcatttgacttgaaggctgatgacaatcttaatcagctacaagtcaaattgaaggaaagattaaagggaaagaagtttcttatagttttggatgatgtgtggaatgacaactacaacaagtgggatgaattgagaaatgtttttgtacaaggagatataggaagtaagatcattgtgacgacacgtaaagagagtgttgccatgatgatgggaaatgagcaaattagcatggacaatttgtctactgaatcctcttggtctttatttaaaacacatgcatttgaaaacatgggtcctatgggacatccggaacttgaagaggtcgggaaacaaattgcagctaagtgcaaaggactgcccttagctctgaagacgctcgctggcatgttacgctccaaatcagaggttgaagagtggaaacgtattttgagaagtgaaatatgggagctgccacacaatgacatattaccagcgttgatgttgagctacaatgatcttcccgcacatttaaagcgatgtttttccttttgtgcaatatttcctaaagattatccctttaggaaagaacaagttattcatctgtggattgccaatggtctcgtaccacaggaagatgtaataattgaagattcaggcaaccaatactttctcgagttgaggtcaagatcattattcgaaagggtcccaaatccttctcaagggaacacagagaatttattcttaatgcatgaccttgtcaatgatttagcgcaaattgcatcttcaaaactttgtatcaggttggaagagagccaaggatctcatatgttggaacaaagtcaacacttatcatattcaatgggatatggtggtgagtttgagaaattgacacccctctacaaattggagcagctgaggacattgcttccgacatgtattgatctccctgattgttgtcaccatctaagcaagagggtgctacataacatactgccaagactaacatccttaagggcattatcgttgtcatgctatgagattgttgagttgccaaatgacttgtttatcaaattaaagctcctcagatttttggatatttctcggacagagattaaaaggttgccagattccatttgtgcattgtataacttagagacacttctcctgtcatcttgttatgatcttgaggagctaccgctgcagatggagaagctgattaacttgcgtcatcttgacataagcaacactcgtctcttgaagatgccgctacatctgagcaagttgaaaagcctccaagtgttagtgggagccaaatttcttataggtggtttgagaatggaagatttgggtgaagtacataacttgtacggatctctatcagttgtagagttgcaaaatgtggttgatagaagggaagctgtgaaggcaaagatgagggagaagaatcacgtcgacaggttatatttggagtggagtggaagtagtagtgccgacaattcacaaacagaaagagacatacttgatgagctacgcccccataaaaacataaaagtagtcaaaatcactggatatagagggacaaactttcccaattggctagctgatcctttgtttcttaagctggtaaaattgtctcttagaaactgcaagaactgttattcattgccagcactaggacaactcccttttctgaaattcctttcgattagagagatgcatggaataacagaggtgacggaagaattctatggcagttggtcctccaaaaagccttttaactgtcttgagaagcttgaatttaaagatatgccggagtggaagcaatgggacctactaggaagtggagagttccctatacttgagaagcttttgattgaaaattgccctgaactcagtttggagacggtacccatccaactttcaagtttaaaaagttttgacgtaattggttctcccttggttataaactttcctttaagcatactgcccactaccttgaagagaataaagatatctgattgccagaaattgaaattggaacagccaactggtgagattagtatgtttctggaggaattgacactgattaaatgtgattgtatagatgatatatcacctgagttactcccaagagcacgcaaattgtgggtacaggattggcacaaccttactaggtttttgattcctactgccactgaaactctcgatatttggaattgtgagaatgttgaaatactttcggtggcatgtggggggacccagatgacgtcactgactattgcctactgtaagaagctgaagtggctgccagaacgtatgcaggaactccttccatctcttaaggaactgcatctgtctaattgtccagaaatagagtcctttcctgaaggtggattgcccttcaatttacaacaacttgcgatcagatattgcaagaaactggtgaacggccgaaaggagtggcatttacagagacgactctgtctcacagcgttaatcatctaccatgatggcagtgacgaagagattgttggtggtgagaattgggagttgccttcctctattcaaaggcttaccatagtgaatctgaaaacattaagcagccaacatctcaaaaacctcacctctcttcaatatctatttattaggggtaatttacctcagattcagccaatgctggaacaaggccagtgttcgcacctcacttcgcttcaaagtctacaaatctcctccctccaatcacttcctgaatcggcactgccctcctccctctctcacctggagatctcccattgccctaatctccaatcacttcctgaatcggcactgccctcctccctctctcggctgaccatcaataattgccctaatctccaatcactttccgaatcaacactgccctcctccctctctcagctggagatctccttttgccctaatctccaatatcttccactaaaagggatgccctcttccctctctgaactatctatttacagatgcccattgctcaaaccacaactagaatttgacaagggggaatactggccaaatattgctcaatttcccaccataaagatcgatagggaatgcatgtga

SEQ ID NO: 30 - protein, 1282 aa, Artificial Sequence
  protein encoded by mutant R3a
MEIGLAVGGAFLSSALNVLFDRLAPHGDLLNMFQKHKDHVKLLKKLEDILLGLQIVLSDAENKQASNRHVSQWFNKLQNAVDGAENLIEQVNYEALRLKVEGQHQNLAETSNQQVSDLNLCFSDDFFLNIKDKLEETIETLEVLEKQIGRLGLKEHFGSTKQETRTPSTSLVDDSDIFGRQNDIEDLIDRLLSEDASGKKRTVVPIVGMGGLGKTTLAKAVYNDERVQIHFGLKAWFCVSEAFDAFRITKGLLQEIGSFDLKADDNLNQLQVKLKERLKGKKFLIVLDDVWNDNYNKWDELRNVFVQGDIGSKIIVTTRKESVAMMMGNEQISMDNLSTESSWSLFKTHAFENMGPMGHPELEEVGKQIAAKCKGLPLALKTLAGMLRSKSEVEEWKRILRSEIWELPHNDILPALMLSYNDLPAHLKRCFSFCAIFPKDYPFRKEQVIHLWIANGLVPQEDVIIEDSGNQYFLELRSRSLFERVPNPSQGNTENLFLMHDLVNDLAQIASSKLCIRLEESQGSHMLEQSQHLSYSMGYGGEFEKLTPLYKLEQLRTLLPTCIDLPDCCHHLSKRVLHNILPRLTSLRALSLSCYEIVELPNDLFIKLKLLRFLDISRTEIKRLPDSICALYNLETLLLSSCYDLEELPLQMEKLINLRHLDISNTRLLKMPLHLSKLKSLQVLVGAKFLIGGLRMEDLGEVHNLYGSLSVVELQNVVDRREAVKAKMREKNHVDRLYLEWSGSSSADNSQTERDILDELRPHKNIKVVKITGYRGTNFPNWLADPLFLKLVKLSLRNCKNCYSLPALGQLPFLKFLSIREMHGITEVTEEFYGSWSSKKPFNCLEKLEFKDMPEWKQWDLLGSGEFPILEKLLIENCPELSLETVPIQLSSLKSFDVIGSPLVINFPLSILPTTLKRIKISDCQKLKLEQPTGEISMFLEELTLIKCDCIDDISPELLPRARKLWVQDWHNLTRFLIPTATETLDIWNCENVEILSVACGGTQMTSLTIAYCKKLKWLPERMQELLPSLKELHLSNCPEIESFPEGGLPFNLQQLAIRYCKKLVNGRKEWHLQRRLCLTALIIYHDGSDEEIVGGENWELPSSIQRLTIVNLKTLSSQHLKNLTSLQYLFIRGNLPQIQPMLEQGQCSHLTSLQSLQISSLQSLPESALPSSLSHLEISHCPNLQSLPESALPSSLSRLTINNCPNLQSLSESTLPSSLSQLEISFCPNLQYLPLKGMPSSLSELSIYRCPLLKPQLEFDKGEYWPNIAQFPTIKIDRECM

SEQ ID NO: 31 - DNA, 3849 bp, Artificial Sequence
  mutant R3a
  allele (0)...(0): 6C/C10
  CDS (1)...(3849)
atggagattggcttagcagttggtggtgcatttctctcttcagctttgaatgttctctttgataggcttgctcctcacggtgatctgctcaacatgtttcagaagcataaggatcatgttaagctcttaaagaagctggaggacattttgctcggtcttcagattgtgctaagtgatgcagagaataaacaagcatcaaatcgacatgtgagccagtggttcaataagcttcagaatgctgtggacggtgctgagaacttgatagaacaagtcaattatgaagctttgaggcttaaggtggaaggccagcatcaaaatcttgcagaaacaagcaaccagcaagtaagtgaccttaacctgtgcttcagtgatgatttctttcttaacataaaggataagttggaagaaaccattgaaacattggaggtgttggaaaagcaaattggtcgccttggcttaaaggaacattttggttcgactaaacaagaaactagaacaccttcaacttctttagttgatgactctgatatctttggaaggcagaatgatatagaggatttgattgaccgtttattatctgaagatgcaagtggaaaaaagcggactgtagttcctattgttggaatgggtggtctgggtaagacaacacttgctaaagcggtttacaatgatgagagagtgcagatacattttggtttgaaagcttggttttgtgtttctgaggcatttgatgctttcagaataacaaaagggttacttcaagaaattggctcatttgacttgaaggctgatgacaatcttaatcagctacaagtcaaattgaaggaaagattaaagggaaagaagtttcttatagttttggatgatgtgtggaatgacaactacaacaagtgggatgaattgagaaatgtttttgtacaaggagatataggaagtaagatcattgtgacgacacgtaaagagagtgttgccttgatgatgggaaatgagcaaattagcatggacaatttgtctactgaatcctcttggtctttatttaaaacacatgcatttgaaaacatgggtcctatgggacatccggaacttgaagaggtcgggaaacaaattgcagctaagtgcaaaggactgcccttagctctgaagacgctcgctggcatgttacgctccaaatcagaggttgaagagtggaaacgtattttgagaagtgaaatatgggagctgccacacaatgacatattaccagcgttgatgttgagctacaatgatcttcccgcacatttaaagcgatgtttttccttttgtgcaatatttcctaaagattatccctttaggaaagaacaagttattcatctgtggattgccaatggtctcgtaccacaggaagatgtaataattgaagattcaggcaaccaatactttctcgagttgaggtcaagatcattattcgaaagggtcccaaatccttctcaagggaacacagagaatttattcttaatgcatgaccttgtcaatgatttagcgcaaattgcatcttcaaaactttgtatcaggttggaagagagccaaggatctcatatgttggaacaaagtcaacacttatcatattcaatgggatatggtggtgagtttgagaaattgacacccctctacaaattggagcagctgaggacattgcttccgacatgtattgatctccctgattgttgtcaccatctaagcaagagggtgctacataacatactgccaagactaacatccttaagggcattatcgttgtcatgctatgagattgttgagttgccaaatgacttgtttatcaaattaaagctcctcagatttttggatatttctcggacagagattaaaaggttgccagattccatttgtgcattgtataacttagagacacttctcctgtcatcttgttatgatcttgaggagctaccgctgcagatggagaagctgattaacttgcgtcatcttgacataagcaacactcgtctcttgaagatgccgctacatctgagcaagttgaaaagcctccaagtgttagtgggagccaaatttcttataggtggtttgagaatggaagatttgggtgaagtacataacttgtacggatctctatcagttgtagagttgcaaaatgtggttgatagaagggaagctgtgaaggcaaagatgagggagaagaatcacgtcgacaggttatatttggagtggagtggaagtagtagtgccgacaattcacaaacagaaagagacatacttgatgagctacgcccccataaaaacataaaagtagtcaaaatcactggatatagagggacaaactttcccaattggctagctgatcctttgtttcttaagctggtaaaattgtctcttagaaactgcaagaactgttattcattgccagcactaggacaactcccttttctgaaattcctttcgattagagagatgcatggaataacagaggtgacggaagaattctatggcagttggtcctccaaaaagccttttaactgtcttgagaagcttgaatttaaagatatgccggagtggaagcaatgggacctactaggaagtggagagttccctatacttgagaagcttttgattgaaaattgccctgaactcagtttggagacggtacccatccaactttcaagtttaaaaagttttgacgtaattggttctcccttggttataaactttcctttaagcatactgcccactaccttgaagagaatagagatatctgattgccagaaattgaaattggaacagccaactggtgagattagtatgtttctggaggaattgacactgattaaatgtgattgtatagatgatatatcacctgagttactcccaagagcacgcaaattgtgggtacaggattggcacaaccttactaggtttttgattcctactgccactgaaactctcgatatttggaattgtgagaatgttgaaatactttcggtggcatgtggggggacccagatgacgtcactgactattgcctactgtaagaagctgaagtggctgccagaacgtatgcaggaactccttccatctcttaaggaactgcatctgtctaattgtccagaaatagagtcctttcctgaaggtggattgcccttcaatttacaacaacttgcgatcagatattgcaagaaactggtgaacggccgaaaggagtggcatttacagagacgactctgtctcacagcgttaatcatctaccatgatggcagtgacgaagagattgttggtggtgagaattgggagttgccttcctctattcaaaggcttaccatagtgaatctgaaaacattaagcagccaacatctcaaaaacctcacctctcttcaatatctatttattaggggtaatttacctcagattcagccaatgctggaacaaggccagtgttcgcacctcacttcgcttcaaagtctacaaatctcctccctccaatcacttcctgaatcggcactgccctcctccctctctcacctggagatctcccattgccctaatctccaatcacttcctgaatcggcactgccctcctccctctctcagctgaccatcaataattgccctaatctccaatcactttccgaatcaacactgccctcctccctctctcagctggagatctccttttgccctaatctccaatatcttccactaaaagggatgccctcttccctctctgaactatctatttacaaatgcccattgctcaaaccacaactagaatttgacaagggggaatactggccaaatattgctcaatttcccaccataaagatcgatagggaatgcatgtga

SEQ ID NO: 32 - protein, 1282 aa, Artificial Sequence
  protein encoded by mutant R3a
MEIGLAVGGAFLSSALNVLFDRLAPHGDLLNMFQKHKDHVKLLKKLEDILLGLQIVLSDAENKQASNRHVSQWFNKLQNAVDGAENLIEQVNYEALRLKVEGQHQNLAETSNQQVSDLNLCFSDDFFLNIKDKLEETIETLEVLEKQIGRLGLKEHFGSTKQETRTPSTSLVDDSDIFGRQNDIEDLIDRLLSEDASGKKRTVVPIVGMGGLGKTTLAKAVYNDERVQIHFGLKAWFCVSEAFDAFRITKGLLQEIGSFDLKADDNLNQLQVKLKERLKGKKFLIVLDDVWNDNYNKWDELRNVFVQGDIGSKIIVTTRKESVALMMGNEQISMDNLSTESSWSLFKTHAFENMGPMGHPELEEVGKQIAAKCKGLPLALKTLAGMLRSKSEVEEWKRILRSEIWELPHNDILPALMLSYNDLPAHLKRCFSFCAIFPKDYPFRKEQVIHLWIANGLVPQEDVIIEDSGNQYFLELRSRSLFERVPNPSQGNTENLFLMHDLVNDLAQIASSKLCIRLEESQGSHMLEQSQHLSYSMGYGGEFEKLTPLYKLEQLRTLLPTCIDLPDCCHHLSKRVLHNILPRLTSLRALSLSCYEIVELPNDLFIKLKLLRFLDISRTEIKRLPDSICALYNLETLLLSSCYDLEELPLQMEKLINLRHLDISNTRLLKMPLHLSKLKSLQVLVGAKFLIGGLRMEDLGEVHNLYGSLSVVELQNVVDRREAVKAKMREKNHVDRLYLEWSGSSSADNSQTERDILDELRPHKNIKVVKITGYRGTNFPNWLADPLFLKLVKLSLRNCKNCYSLPALGQLPFLKFLSIREMHGITEVTEEFYGSWSSKKPFNCLEKLEFKDMPEWKQWDLLGSGEFPILEKLLIENCPELSLETVPIQLSSLKSFDVIGSPLVINFPLSILPTTLKRIEISDCQKLKLEQPTGEISMFLEELTLIKCDCIDDISPELLPRARKLWVQDWHNLTRFLIPTATETLDIWNCENVEILSVACGGTQMTSLTIAYCKKLKWLPERMQELLPSLKELHLSNCPEIESFPEGGLPFNLQQLAIRYCKKLVNGRKEWHLQRRLCLTALIIYHDGSDEEIVGGENWELPSSIQRLTIVNLKTLSSQHLKNLTSLQYLFIRGNLPQIQPMLEQGQCSHLTSLQSLQISSLQSLPESALPSSLSHLEISHCPNLQSLPESALPSSLSQLTINNCPNLQSLSESTLPSSLSQLEISFCPNLQYLPLKGMPSSLSELSIYKCPLLKPQLEFDKGEYWPNIAQFPTIKIDRECM

SEQ ID NO: 33 - DNA, 3849 bp, Artificial Sequence
  mutant R3a
  allele (0)...(0): 6D/A1
  CDS (1)...(3849)
atggagattggcttagcagttggtggtgcatttctctcttcagctttgaatgttctctttgataggcttgctcctcacggtgacctgctcaacatgtttcagaagcataaggaacatgttaagctcttaaagaagctggaggacattttgctcggtcttcagattgtgctaagtgatgcagagaataaacaagcatcaaatcgacatgtgagccagtggttcaataagcttcagaatgctgtggacggtgctgagaccttgatagaacaagtcaattatgaagctttgaggcttaaggtggaaggccagcatcaaaatcttgcagaaacaagcaaccagcaagtaagtgaccttaacctgtgcttcagtgatgatttctttcttaacataaaggataagttggaagaaaccattgaaacattggaggtgttggaaaagcaatttggtcgccttggcttaaaggaacattttggttcgactaaacaagaaactagaacaccttcaacttctttagttgatgactctgatatctttggaaggcagaatgatatagaggatttgattgaccgtttattatctgaagatgcaagtggaaaaaagcggactgtagttcctattgttggaatgggtggtctgggtaagacaacacttgctaaagcggtttacaatgatgagagagtgcagatacattttggtttgaaagcttggttttgtgtttctgaggcatttgatgctttcagaataacaaaagggttacttcaagaaattggctcatttgacttgaaggctgatgacaatcttaatcagctacaagtcaaattgaaggaaagattaaagggaaagaagtttcttatagttttggatgatgtgtggaatgacaactacaacaagtgggatgaattgagaaatgtttttgtacaaggagatataggaagtaagatcattgtgacgacacgtaaagagagtgttgccttgatgatgggaaatgagcaaattagcatggacaatttgtctactgaatcctcttggtctttatttaaaacacatgcatttgaaaacatgggtcctatgggacatccggaacttgaagaggtcgggaaacaaattgcagctaagtgcaaaggactgcccttagctctgaagacgctcgctggcatgttacgctccaaatcagaggttgaagagtggaaacgtattttgagaagtgaaatatgggagctgccacacaatgacatattaccagcgttgatgttgagctacaatgatcttcccgcacatttaaagcgatgtttttccttttgtgcaatatttcctaaagattatccctttaggaaagaacaagttattcatctgtggattgccaatggtctcgtaccacaggaagatgtaataattgaagattcaggcaaccaatactttctcgagttgaggtcaagatcattattcgaaagggtcccaaatccttctcaagggaacacagagaatttattcttaatgcatgaccttgtcaatgatttagcgcaaattgcatcttcaaaactttgtatcaggttggaagagagtcaaggatctcatatgttggaacaaagtcaacacttatcatattcaatgggatatggtggtgagtttgagaaattgacacccctctacaaattggagcagctgaggacattgcttccgacatgtattgatctccctgattgttgtcaccatctaagcaagagggtgctacataacatactgccaagactaacatccttaagggcattatcgttgtcatgctatgagattgttgagttgccaaatgacttgtttatcaaattaaagctcctcagatttttggatatttctcggacagagattaaaaggttgccagattccatttgtgcattgtataacttagagacacttctcctgtcatcttgttatgatcttgaggagctaccgctgcagatggagaagctgattaacttgcgtcatcttgacataagcaacactcgtctcttgaagatgccgctacatctgagcaagttgaaaagcctccaagtgttagtgggagccaaatttcttataggtggtttgagaatggaagatttgggtgaagtacataacttgtacggatctctatcagttgtagagttgcaaaatgtggttgatagaagggaagctgtgaaggcaaagatgagggagaagaatcacgtcgacaggttatatttggagtggagtggaagtagtagtgccgacaattcacaaacagaaagagacatacttgatgagctacgcccccataaaaacataaaagtagtcaaaatcactggatatagagggacaaactttcccaattggctagctgatcctttgtttcttaagctggtaaaattgtctcttagaaactgcaagaactgttattcattgccagcactaggacaactcccttttctgaaattcctttcgattagagagatgcatggaataacagaggtgacggaagaattctatggcagttggtcctccaaaaagccttttaactgtcttgagaagcttgaatttaaagatatgccggagtggaagcaatgggacctactaggaagtggagagttccctatacttgagaagcttttgattgaaaattgccctgaactcagtttggagacggtacccatccaactttcaagtttaaaaagttttgacgtaattggttctcccttggttataaactttcctttaagcatactgcccactaccttgaagagaataaagatatctgattgccagaaattgaaattggaacagccaactggtgagattagtatgtttctggaggaattgacactgattaaatgtgattgtatagatgatatatcacctgtgttactcccaagagcacgcaaattgtgggtacaagattggcacaaccttactaggtttttgattcctactgccactgaaactctcgatatttggaattgtgagaatgttgaaatactttcggtggcatgtggggggacccagatgacgtcactgactattgcctactgtaagaagctgaagtggctgccagaacgtatgcaggaactccttccatctcttaaggaactgcatctgtctaattgtccagaaatagagtcctttcctgaaggtggattgcccttcaatttacaacaacttgcgatcagatattgcaagaaactggtgaacggccgaaaggagtggcatttacagagacgactctgtctcacagcgttaatcatctaccatgatggcagtgacgaagagattgttggtggtgagaattgggagttgccttcctctattcaaaggcttaccatagtgaatctgaaaacattaagcagccaacatctcaaaaacttcacctctcttcaatatctatttattaggggtaatttacctcagattcagccaatgctggaacaaggccagtgttcgcacctcacttcgcttcaaagtctacaaatctcctccctccaatcacttcctgaatcggcactgccctcctccctctctcacctggagatctcccattgccctaatctccaatcacttcctgaatcggcactgccctcctccctctctcagctgaccatcaataattgccctaatctccaatcactttccgaatcaacactgccctcctccctctctcagctggagatctccttttgccctaatctccaatatcttccactaaaagggatgccctcttccctctctgaactatctatttacaaatgcccattgctcaaaccacaactagaatttgacaagggggaatactggccaaatattgctcaatttcccaccataaagatcgatagggaatgcatgtga

SEQ ID NO: 34 - protein, 1282 aa, Artificial Sequence
  protein encoded by mutant R3a
MEIGLAVGGAFLSSALNVLFDRLAPHGDLLNMFQKHKEHVKLLKKLEDILLGLQIVLSDAENKQASNRHVSQWFNKLQNAVDGAETLIEQVNYEALRLKVEGQHQNLAETSNQQVSDLNLCFSDDFFLNIKDKLEETIETLEVLEKQFGRLGLKEHFGSTKQETRTPSTSLVDDSDIFGRQNDIEDLIDRLLSEDASGKKRTVVPIVGMGGLGKTTLAKAVYNDERVQIHFGLKAWFCVSEAFDAFRITKGLLQEIGSFDLKADDNLNQLQVKLKERLKGKKFLIVLDDVWNDNYNKWDELRNVFVQGDIGSKIIVTTRKESVALMMGNEQISMDNLSTESSWSLFKTHAFENMGPMGHPELEEVGKQIAAKCKGLPLALKTLAGMLRSKSEVEEWKRILRSEIWELPHNDILPALMLSYNDLPAHLKRCFSFCAIFPKDYPFRKEQVIHLWIANGLVPQEDVIIEDSGNQYFLELRSRSLFERVPNPSQGNTENLFLMHDLVNDLAQIASSKLCIRLEESQGSHMLEQSQHLSYSMGYGGEFEKLTPLYKLEQLRTLLPTCIDLPDCCHHLSKRVLHNILPRLTSLRALSLSCYEIVELPNDLFIKLKLLRFLDISRTEIKRLPDSICALYNLETLLLSSCYDLEELPLQMEKLINLRHLDISNTRLLKMPLHLSKLKSLQVLVGAKFLIGGLRMEDLGEVHNLYGSLSVVELQNVVDRREAVKAKMREKNHVDRLYLEWSGSSSADNSQTERDILDELRPHKNIKVVKITGYRGTNFPNWLADPLFLKLVKLSLRNCKNCYSLPALGQLPFLKFLSIREMHGITEVTEEFYGSWSSKKPFNCLEKLEFKDMPEWKQWDLLGSGEFPILEKLLIENCPELSLETVPIQLSSLKSFDVIGSPLVINFPLSILPTTLKRIKISDCQKLKLEQPTGEISMFLEELTLIKCDCIDDISPVLLPRARKLWVQDWHNLTRFLIPTATETLDIWNCENVEILSVACGGTQMTSLTIAYCKKLKWLPERMQELLPSLKELHLSNCPEIESFPEGGLPFNLQQLAIRYCKKLVNGRKEWHLQRRLCLTALIIYHDGSDEEIVGGENWELPSSIQRLTIVNLKTLSSQHLKNFTSLQYLFIRGNLPQIQPMLEQGQCSHLTSLQSLQISSLQSLPESALPSSLSHLEISHCPNLQSLPESALPSSLSQLTINNCPNLQSLSESTLPSSLSQLEISFCPNLQYLPLKGMPSSLSELSIYKCPLLKPQLEFDKGEYWPNIAQFPTIKIDRECM

SEQ ID NO: 35 - DNA, 3849 bp, Artificial Sequence
  mutant R3a
  allele (0)...(0): 6D/E6
  CDS (1)...(3849)
atggagattggcttagcagttggtggtgcatttctctcttcagctttgaatgttctctttgataggcttgctcctcacggtgatctgctcaacatgtttcagaagcataaggatcatgttaagctcttaaagaagctggaggacattttgctcggtcttcagattgtgctaagtgatgcagagaataaacaagcatcaaatcgacatgtgagccagtggttcaataagcttcagaatgctgtggacggtgctgagaacttgatagaacaagtcaattatgaagctttgaggcttaaggtggaaggccagcatcaaaatcttgcagaaacaagcaaccagcaagtaagtgaccttaacctgtgcttcagtgatgatttctttcttaacataaaggataagttggaagaaaccattgaaacattggaggtgttggaaaagcaaattggtcgccttggcttaaaggaacattttggttcgactaaacaagaaactagaacaccttcaacttctttagttgatgactctgatatctttggaaggcagaatgatatagaggatttgattgaccgtttattatctgaagatgcaagtggaaaaaagcggactgtagttcctattgttggaatgggtggtctgggtaagacaacacttgctaaagcggtttacaatgatgagagagtgcagatacattttggtttgaaagcttggttttgtgtttctgaggcatttgatgctttcagaataacaaaagggttacttcaagaaattggctcatttgacttgaaggctgatgacaatcttaatcagctacaagtcaaattgaaggaaagattaaagggaaagaagtttcttatagttttggatgatgtgtggaatgacaactacaacaagtgggatgaattgagaaatgtttttgtacaaggagatataggaagtaagatcattgtgacgacacgtaaagagagtgttgccttgatgatgggaaatgagcaaattagcatggactatttgtctactgaatcctcttggtctttatttaaaacacatgcatttgaaaacatgggtcctatgggacatccggaacttgaagaggtcgggaaacaaattgcagctaagtgcaaaggactgcccttagctctgaagacgctcgctggcatgttacgctccaaatcagaggttgaagagtggaaacgtattttgagaagtgaaatatgggagctgccacacaatgacatattaccagcgttgatgttgagctacaatgatcttcccgcacatttaaagcgatgtttttccttttgtgcaatatttcctaaagattatccctttaggaaagaacaagttattcatctgtggattgccaatggtctcgtaccacaggaagatgtaataattgaagattcaggcaaccaatactttctcgagttgaggtcaagatcattattcgaaagggtcccaaatccttctcaagggaacacagagaatttattcttaatgcatgaccttgtcaatgatttagcgcaaattgcatcttcaaaactttgtatcaggttggaagagagccaaggatctcatatgttggaacaaagtcaacacttatcatattcaatgggatatggtggtgagtttgagaaattgacacccctctacaaattggagcagctgaggacattgcttccgacatgtattgatctccctgattgttgtcaccatctaagcaagagggtgctacataacatactgccaagactaacatccttaagggcattatcgttgtcatgctatgagattgttgagttgccaaatgacttgtttatcaaattaaagctcctcagatttttggatatttctcggacagagattaaaaggttgccagattccatttgtgcattgtataacttagagacacttctcctgtcatcttgttatgatcttgaggagctaccgctgcagatggagaagctgattaacttgcgtcatcttgacataagcaacactcgtctcttgaagatgccgctacatctgagcaagttgaaaagcctccaagtgttagtgggagccaaatttcttataggtggtttgagaatggaagatttgggtgaagtacataacttgtacggatctctatcagttgtagagttgcaaaatgtggttgatagaagggaagctgtgaaggcaaagatgagggagaagaatcacgtcgacaggttatatttggagtggagtggaagtagtagtgccgacaattcacaaacagaaagagacatacttgatgagctacgcccccataaaaacataaaagtagtcaaaatcactggatatagagggacaaactttcccaattggctagctgatcctttgtttcttaagctggtaaaattgtctcttagaaactgcaagaactgttattcattgccagcactaggacaactcccttttctgaaattcctttcgattagagagatgcatggaataacagaggtgacggaagaattctatggcagttggtcctccaaaaagccttttaactgtcttgagaagcttgaatttaaagatatgccggagtggaagcaatgggacctactaggaagtggagagttccctatacttgagaagcttttgattgaaaattgccctgaactcagtttggagacggtacccatccaactttcaagtttaaaaagttttgacgtaattggttctcccttggttataaactttcctttaagcatactgcccactaccttgaagagaataaagatatctgattgccagaaattgaaattggaacagccaactggtgagattagtatgtttctggaggaattgacactgattaaatgtgattgtatagatgatatatcacctgagttactcccaagagcacgcaaattgtgggtacaggattggcacaaccttactaggtttttgattcctactgccactgaaactctcgatatttggaattgtgagaatgttgaaatactttcggtggcatgtggggggacccagatgacgtcactgactattgcctactgtaagaagctgaagtggctgccagaacgtgtgcaggaactccttccatctcttaaggaactgcatctgtctaattgtccagaaatagagtcctttcctgaaggtggattgcccttcaatttacaacaacttgcgatcagatattgcaagaaactggtgaacggccgaaaggagtggcatttacagagacgactctgtctcacagcgttaatcatctaccatgatggcagtgacgaagagattgttggtggtgagaattgggagttgccttcctctattcaaaggcttaccatagtgaatctgaaaacattaagcagccaacatctcaaaaacctcacctctcttcaatatctatttattaggggtaatttacctcagattcagccaatgctggaacaaggccagtgttcgcacctcacttcgcttcaaagtctacaaatctcctccctccaatcacttcctgaatcggcactgccctcctccctctctcacctggagatctcccattgccctaatctccgatcacttcctgaatcggcactgccctcctccctctctcagctgaccatcaataattgccctaatctccaatcactttccgaatcaacactgccctcctccctctctcagctggagatctccttttgccctaatctccaatatcttccactaaaagggatgccctcttccctctctgaactatctatttacaaatgcccattgctcaaaccacaactagaatttgacaagggggaatactggccaaatattgctcaatttcccaccataaagatcgatagggaatgcatgtga

SEQ ID NO: 36 - protein, 1282 aa, Artificial Sequence
  protein encoded by mutant R3a
MEIGLAVGGAFLSSALNVLFDRLAPHGDLLNMFQKHKDHVKLLKKLEDILLGLQIVLSDAENKQASNRHVSQWFNKLQNAVDGAENLIEQVNYEALRLKVEGQHQNLAETSNQQVSDLNLCFSDDFFLNIKDKLEETIETLEVLEKQIGRLGLKEHFGSTKQETRTPSTSLVDDSDIFGRQNDIEDLIDRLLSEDASGKKRTVVPIVGMGGLGKTTLAKAVYNDERVQIHFGLKAWFCVSEAFDAFRITKGLLQEIGSFDLKADDNLNQLQVKLKERLKGKKFLIVLDDVWNDNYNKWDELRNVFVQGDIGSKIIVTTRKESVALMMGNEQISMDYLSTESSWSLFKTHAFENMGPMGHPELEEVGKQIAAKCKGLPLALKTLAGMLRSKSEVEEWKRILRSEIWELPHNDILPALMLSYNDLPAHLKRCFSFCAIFPKDYPFRKEQVIHLWIANGLVPQEDVIIEDSGNQYFLELRSRSLFERVPNPSQGNTENLFLMHDLVNDLAQIASSKLCIRLEESQGSHMLEQSQHLSYSMGYGGEFEKLTPLYKLEQLRTLLPTCIDLPDCCHHLSKRVLHNILPRLTSLRALSLSCYEIVELPNDLFIKLKLLRFLDISRTEIKRLPDSICALYNLETLLLSSCYDLEELPLQMEKLINLRHLDISNTRLLKMPLHLSKLKSLQVLVGAKFLIGGLRMEDLGEVHNLYGSLSVVELQNVVDRREAVKAKMREKNHVDRLYLEWSGSSSADNSQTERDILDELRPHKNIKVVKITGYRGTNFPNWLADPLFLKLVKLSLRNCKNCYSLPALGQLPFLKFLSIREMHGITEVTEEFYGSWSSKKPFNCLEKLEFKDMPEWKQWDLLGSGEFPILEKLLIENCPELSLETVPIQLSSLKSFDVIGSPLVINFPLSILPTTLKRIKISDCQKLKLEQPTGEISMFLEELTLIKCDCIDDISPELLPRARKLWVQDWHNLTRFLIPTATETLDIWNCENVEILSVACGGTQMTSLTIAYCKKLKWLPERVQELLPSLKELHLSNCPEIESFPEGGLPFNLQQLAIRYCKKLVNGRKEWHLQRRLCLTALIIYHDGSDEEIVGGENWELPSSIQRLTIVNLKTLSSQHLKNLTSLQYLFIRGNLPQIQPMLEQGQCSHLTSLQSLQISSLQSLPESALPSSLSHLEISHCPNLRSLPESALPSSLSQLTINNCPNLQSLSESTLPSSLSQLEISFCPNLQYLPLKGMPSSLSELSIYKCPLLKPQLEFDKGEYWPNIAQFPTIKIDRECM

SEQ ID NO: 37 - DNA, 78861 bp, Solanum tuberosum
  misc_feature (0)...(0): SH23G23_BAC_sequence
  CDS (57328)...(61176)
  unsure 31638: n at position 31638 can be a, c, g, or t.
gaattcctgagaattcataagctcaaaaggaaaaggccatcttcaaggaagtacattgctcatgctcaacaattggacctgatgaagtgccgatgaatctttgttgtattttgagctttatgtcttatgtgcttgaattgtaaatctattcctaagctataaaggaattagatctttgttcagttcattcaaaaagtctaagtcaattaggggtaactggtttggtgggcaacattgttgttgcttagtcaaattctaaatcatctagagttaggtggtttagtgggtagtgttgtatctgcttagtcaaagtctaaatcatctaagagttagctgatttagtgggcagtgttatatctgcttagttgaaatctaagttatctagagttaggtggcttagtgggcaatgttgtatctacttagttgttttctttgtaatagagttactacataaagggggaagggatttagaggtaaattcctaggttgcaagaagttgtaatctgaatcgttgctccgtgagtgaaatgaagtttgggttgaaatcttgtgagtacaggtcgtggttttcaccgctcttgagcaagggggtttccacatgtctgatttactttgagctatttatcttctgcacctttatttcagttattgttcttgctgagtcaagggacctgtcccgttgactgatagtggacgcatgcattccgacaagatctagtcactagtacatctcgacgtacaacatacccaatgtaatccaacaagtggtatttggggagggtaagatgtacacaaactttacctctacctttgtgggggtagggaggttgtttcctatagatcctcagcttaaaacaatgaagaaataatagcatcgtgcaagaatatatgatcaacaaaattacaatatacaaagcaaatgaagcaacatatagtaatatacactggaaaaaaaggaagctactcaattacaaaataataatactagtacacctcaagttctttgtgaaatagtagagcagtcacgattaagacagttggatgaacctcgtgaaattaaacttgccagaggagccgatatacaaataataatactaatgctttgataaacgtagcaagaataaatgtctcacacaattatttgatttcaacaaaacttgccaagataaacgtacaagtaatttgctcgttgaaaagcagacaatatggtaaatctaacgaattaagcacatatatctaagcaaattgatatatgttcttacctttaaaaacattcttaaaagtggtggttggcacaaaaggttgtattcatattatttttaacaaaaataagggggtaatagacccccagaaaattgtctttttcaaaaaaaatagaccaagttcaaaaaaggaaactaatctaattttatcagtcaaaacaaaataacttcatgtactttttaactgataatttatgacatatataagatcatagtaactcatcattaattttcatttaaataacgattaagaaattctaataaaataaaaatatttttatttcttagagcctatttggattggcttaaaagttgatcaaacctatttttaagtcatttttagtttttgagcgtgtttgacaaagttaaaaataacttaaaagaagttaaaaaccaaaagtaggataaacatttgctatagaaaaaattattattcaaaaaagaatataataacaatctatttattttaaaaaaaacagttctgatccattaagtaaaacaataagagtatttttggaccaaattattgacgacaatactagctttaaactaaactattaactatgaaattttttatttaggtttacataattcaagaatatttttagacctagtggatcctgtttggtatgcaaggggacctgctacactatgagcaaagtagttatagctatattattagttagttaacttattttttattcgtatccaatgtgggtagataaaatattttatccattttcacctaactctgaattgacccatttcccctagactagatattcaattatcactactttattgaatgtttatattgttttcgattatataaagtacattgtgttatttattaataatatattatatttgcacttttcatttttgtaatggttatattttctttataatttaaagtaaattaacttacaatcttatataaaaataatataaacgaaaattaatttataaaaattatataccaaatttaaaatttaaaatcaatattacataaaatataattaagtatactgcaaacttaattaaaaatataaaaattataatttttatataatacaaataataaaaataaaaaaatgatttagtgttgataaatagtgccacatcaattttaattgcatcaacccaatatgaatagtctttttgaaatatgaggctatcctattggagaaaagctaaagctatattcattgaatagggtgaaatagtgtacaattaagttcttggcctactttatactctaaaagctgacttaaagaaagctgacttaaagagattgtctgagcctgataaaaagaccacccatattaaataaaacatatttcctctcttgcctcaactattcaattgagataaaagacacttgttgttaggtgaaaagtgatactcatggaaaagagaaaaaaagacaaatttaaattattattattttccgacagctgtcagttgctgactgtagaaaactatagttgtaccaattatagatcaataacaaatcagtgatcattcctgtttgcaaattactcttagcattcaacaggtaaagtaaagttgttagtaaatcaagatagaaaaatttatcttctcaaaatcatattgtgttctccttgttttgctttgcagatttctgaaatggagattggcttagcagttggtggtgcatttctctcttcagctttgaatgttctctttgataggcttgctcctaacggtgatctgctcaacatgtttcggaagcataaggatcatgttcggctgttaaagaagctgaaaatgactttgcgtggtcttcagattgtgctaagtgatgcagagaataagcaggcatcaaatccatctgtgagagactggcttaatgagcttcgagatgctgtggactctgctgaaaacttaatagaagaagttaattatcaagtgttgaggcttaaggtggaaggtcagcatcaaaatcttgcagaaacaggcaaccagcaagtaagtgacctcaacctttgcttgagtgatgaatttttccttaacataaaggacaagttggaagacactattgaaacattaaaggatttgcaagagcaaattggtctccttggcttaaaggagtattttggttcaactaaacaagaaactagaaaaccttcaacttctgtggatgatgaatctgatatctttggtaggcagagggaaatagaggatttgattgaccgtttattgtctgaagatgcaagtgggaaaaagctgacagtagttcctattgttggaatgggcggcctgggtaagacaacacttgctaaagccgtttacaataatgagagggtgaagaaccattttggtttgaaagcttggtgttgtgtttcagagccatatgatgctttgagaataacgaaagggttacttcaagaaattggcaaatttgactcaaatgatgtctacaacaatctcaatcagcttcaagtcaaattgaaggaaagcttgaagggaaagaagttccttattgttttggatgatgtgtggaatgacaactacaacgagtgggatgacttaagaaatatttttgtacaaggagatataggatgtaagatcattgtgacgacacgcaaagagagtgttgccttgatgatgggaaatgagcaaattagcatgaacaatttgcctactgaagcctcttggtctttatttaaaacacatgcatttgaaaacatggatcctatgggacattcggaacttgaagaggtcggaaaacaaatttcagctaagtgcaaaggactgcccttagctctgaagacgctcgctggcatgttacgctccaaatcagacgttgaagagtggacacgcattttgagaagtgaaatatgggagctgccacacaatgacatattaccagcgttgatgttgagctacaatgatcttcctgctcatttaaagcggtgtttttcctattgtgcaatatttcctaaagattatccatttaggaaagaacaagctattcatctgtggattgccaatggtctcgtaccacagggagatgaaataattgaagattcaggcaaccagtactttctggagttgagatcaagatcattatttcaaagggtcccaaatccttctgaactgaacatagagaatttattcttaatgcatgaccttgtcaatgatttagcccaagttgcatcttcaaaactttgtatcagattggaagagagccaaggatatcatctgttggaaaagggtcggcacttatcatattcaatgggatatggtggtgagtttgagaaattgacacccctctacaaattggagcagctgaggacattgcttccgacatgtaattatttcatgcctcctaattaccctctatgcaagagggtgttgcataacattctaccaaggctaagatccttaagggcattatcattgtctcattactggattaaggatttgccggatgacttgtttatcaaattgaagctactcagatttttggatatttctcacacagagattaaaaggttgccagatttcatttgtggattgtataacctagagacacttctcctgtcatcttgtggttttcttgaggagctaccgctgcagatggagaagttgattaacttgcgtcaccttgacataagcaacacttctcgcttgaagatgccactacatctgagcaagttgaaaagcctccaagtgctagtaggagccaggtttcttgttggtgatcgtggtggttcgagaatggaagatttgggtgaagtacataacttgtatggatctgtatcagttttagagttgcaaaatgtggttgatagtagggaagctgtgaaggcaaagatgagggagaagaatcacgtcgacaggttatctttggagtggagtggaagtagtagtgcggacaattcacaaacagaaagagacatacttgatgagctacgcccacataaaaacataaaagaactccaaatcattggatatagagggacaaaatttccaaattggctagctgatcctttgtttcttaagctggtgaaattgtctcttagaaactgcaagaactgttattccttgccagcactaggagaactcccttgtttgaaattcctctgcattagagggatgcatggaataacagaggtgacggaagaattctatggtagttggtcctccaaaaagccttttaactgtcttgagaagcttgaatttaaagatatgccggagtggaagcaatggcacataccaggaaatggagagttccctatacttgaggacctttcaattagaaattgtcctgagctcagtttggagacagtacccatccaactttcaagtttaaaaagtttggaagtaattggttctcccatggttggagttgtttttgatgatgcccaacttgagggaatgaagcagattgaggaattacgtattagtgtcaactctcttacctcctttccttttagcatactgcccactaccttgaagacaatagagataactgattgccagaaatgtgagatgagtatgtttctcgaggaattgacactgaatgtatataattgccacaaccttactaggtttttgattcctactgccactgaaagtctctttattttgtattgtgagaatgttgaaatacttttggtggcatgtggggggacccagataacgtcactgagtattgatggctgtttgaagctgaaggggctgccagaacgtatgcaggaactctttccatctcttaatacactgcatctgtctaattgtccagaaatagagtcctttcctgaaggaggattgcccttcaatttacaacaactgattatctacaattgcaagaaactggtgaacggccgaaaggagtggcatttacagagactcacagagctaatcatctaccatgatggcagtgacgaagagattgttggtggtcagaattgggagttgccttcctctattcaaacacttcgaatatggaatctggaaacattaagcagccaacatctcaaaagactcatctctcttcaaaatctatctattaagggtaatgtacctcaaattcagtccatgctggaacaaggccagttttcacacctcacttcgcttcaaagtctacaaatctcctccctccaatcacttcctgaatcggcactgccctcctccctctctcagctgaccatctcccattgccctaatctccaatcacttcctgaattcgcactgccctcctccctctctcagctgaccatcaataattgccctaatctccaatcactttccgaatcaacactgccctcctccctctcccagctggagatctcccattgccctaagctccaatctcttcctgaattggcactgccctcctccctctctcagctgaccatctcccattgccctaagctccaatctcttcctgaatcggcactgccctcctctctctctcagctggccatctccctttgccctaatctccaatcacttccactaaaagggatgccctcttccctctctgaactatctattgacgaatgcccattgctcaaaccactactagaatttgacaagggggaatactggccaaatattgctcaatttcccaccataaaaatcgatggggaatgcatgtgatgattaaaacgaatggctcttcaactgatgtaagctattcttttcccttggaagctttttatttccgtttacttcactttgtttttttgttaattcttctcatttttaattatgttgtgttcattatcatatacaaagctttatatttaagctccatagagaatctaaattgcttttgaaaatataatcagggatgacgatcacaagttttagaaaataagtgcaacttccattgtcagaataattagatgttatgtaattgtatatttcttggatagagactagacaaatacatagggcaatgcttgatgtaagggcttcagatatacatttgcagggtgtttatccaacgagtaagaaaatcactgtcttcagatatcttctcttgcatatgcttttgtaattttaatttgaactgtgttgttgctaacttgaacatgttctgtgcttaatcagatgtcgattttgaagggcgagtgcgacaagtctggtccatccattgtccgcaagaagtgcttctaaggtgctgctgctatttttacatttgttcgcgagttcttttttatttttttgttctttcctctaaagctattatgtcgtccacagtgaacttaggtctgctgttataggcaagtcttcgagatggggctatcaaagaagggcgattaaaatcattgtaccgttgataccatttcatgtttccagtgcaagcctcttttgtaatttgacaaactcgatttgtaaatatgtttgggactcaactagtggttagagtactcattttgtaagatttgtgtacagaaaatcaaattagaaagataactcatgatggctgaataagctcgaagaagtggatttgaatttcaaatcgtgtctttttttttttatgtgtgtgtgtgagagaaatttgaagtgttggtttagatttgttggaatagtctaaagagattgtctctataaaatttgaagacatttgatggaaatctgatcagatgattttgaacaacaattgcaactgaagatggatatgttatatatttttatagtggatatattgttttctcattcggtgtttggtatccacattggagtccgactaaatttggatttgcacatctcaaggggcagcgctcttgaaatgaattttttccattccacggcttgggctcctaattctaattaagaatagaaaaatttcaactatctcgctacaactcatatcagttatatattgggtatacaagtgtaaactaaaaactataactatataggagcaaatatttttttaaaaaccccaaataacaagccaaaataaagaaagaatactaaatcctacactcgttaacatttaaatcctacaacaactaaaaaatatttatagccattgaactcctctgcacagtctacagcaaaatgaagaactcaaattttggccatgaaatgacaccattttctcacactcaaatgatcttaaatttcatgaatgaaacaatatatgttacttaggttgaagccccattttcttcctcgttttcccaacgataaatccttagacttgatcatcccggggactaatccaatgattgttgtgaacgaaaattgagccactgcatcttgccttcctaacgaaacgatgatcttaggagatgatcgaggctcgtatattgcaagttttctttcttttcctccgctcatcaaaagtttcaagttcttcgcggcaactagagcatgcttttgagctgaatatccttgtttgaactcaattgagtaatagaatcaaaattcaagtaccagttagctgcttcaggtcctctggctaccctcggttgtagcttctctattgcaacaaaactaaaaaatcaccacccttcacatatgctactcaaactaataccaatccaagtcatctcatgaataaaatgtgatcaattaaccaaccaatgcctggccaatgatgcctcttctagccttacatacatggcgagggaaatatcaaaggcgcagtggaaaatggcctactacatcgagaaatatagctgactaatcttaactcctaagtcaaagggtaaagaaactcaataccacgattcccgaacaacttggaaccataccttctttccacactattattgatatgaaaataatggtgaaaatcggataaggttgtcaactgcccccattggaaatataggattgactattgactttggaggaactggagttacatctcttttccattcaagagcttttacgtgttttcacgatcttttaagaccacgaaaaatggataaatttcttttcttaggaacacatacaagatttgtcactacaaaaaaggagacattttcaagaaaaaagagttatgcagtttaatgcttaccttaatatcagttatatcaccaacagcaaatatgtttctgtgacccatgattctaagattttcatcaaccttcaatcttccaaaattattgattcgatccttcaaatacgtctcccttaaccactctgaatccggtggctttcccatgcaaagaaaatggcaatccgctctgatagtttccctagacgaagtgaaatatgttctgcttccacccgagttgtttgtgttattactcatatcaacagattgcatcaatttcacttccacattcttgttttttaaccattttaaagtcttgtcagaagtttttggaccgataaactctagtaatctggatccgtagtgcaccaaagttaccttcttctgaggaaaatccacagcgatttctgcagcaagttcaacgccagtaggaccaccaccaacatcaatatagaatcagcttcttttatcttttcattctctgcaacaacaagaatgatgcaaaaattagtcgaacatcacaacattttgactagtaatatcctcacttgtacatctcaacattcacgacaagacaattgactgaatcccgtgtaaacttgctagaggaaccgctcaatggatacaaaacacccatgctttagctttgttttatcatagtccaaaaaggacaccaaaaacagttgagccttgcgccattttgacttgtaatatcaagtagtaatctagaacgttaacaggatgatcacaaaagagaagatttaatcactagcacatctcgtaagagagtaaagcagtcacgatcaagacaattggctgaacctcgtgaaattaaacttgccagaggagccgatttagaaataaagaatctttgctcaacggatacaaaccactaatgctttagcttctttttatcattttccaaaaagttgataaacttagcgagcataaacattccatatgattatacgtacaagtaatttgatcgttggaaagcagacaagatggtaaatccaacgaattaaacacatgaatgatatcttaaagaagtctttgatgctatgtatatatatatatatatatatatacctgtttgatattcttccaatctgtctgttctcgttacaggcaggggatcgtagtgaccggtggctaccacaagatagtcataggtaagttgatgtccatctgcagtcaagacttctttgttggtaatattagtgacttcagacactatgagacgcccattggcgaggtaatctttgtggtggatcaagatctctccgtgaatgaaggctctaccgttgctcttaagctcgcccatggtatctcgaaataatccttcctgttaacagtttttgactaatcaagacacattgaaccaaattgaagtacaccacaaggattgactcaactaatagtttttatctcagaaagtcatttttcttcgagattccaactttcttcaccaaagaaagtgactttctgagatagtaattactacgaaggcctttttttcaatttgttctattttgaagaatccaagcttgatggacaaagttataccatacttgtactagtggaagtaccaaataccatgtgaaatcaattgaggtgcggacaagctgactcagacatcacgattatcaaaataataataataataattagcaaaacttatggaaaggacaaagaaaataacatcttgtttgaatggttggtacctgtattatttctagtgttggacgtttgtcccctattactatataaaatttgtagccaatataaaatcctcacttgtaaattaaaaattatatattcatccacgtatacataatttttttctaactatatatgtcccaaattcttgaatttgtaaacaaaggattcattactattatcgaaatgctagattatctagctacacaagaaataaaaaatttaagactgtcaagaaaaatgataatagaaaaaggaaaaaatttacgtcaacttctaatctcattgtatgtgattaccattagtcgactctccaagctaaagccatttcattggcaaaaggaggcagtctgagtgaagcaacactatgtaataataaaaaataatacaatcaatttaaatattatatttattatcatttaataacacaacacaataaaatacgatatattaagacaaaataataagttgtaccatccaaattagaaaagtgtcagcatagaaggactccaattaaaggaaaggaaattcaatatagtattattgaagaaaccttcaaccttttcggtacctatttcattttatatgatattattatttttattaatatattcaaaaaatattaatttttatatttaaaaataaatttcaatacgttcatcttttcttaataaaaaggtttttatagacatgtaaatatttgtcatttttatgataaaactttctaagtcataccataagaaaatgtccgttttaattaaaatacatcccataaattgataagaaaaacaaagatattaatataatcccataatttgatacgaaaaaaatatattaatataatttaattttcttgaattggtgtacctaggatatgtcattttatatcgtgtctcatcatgtatacagttgaataaatatcaaaaggccacttattattactcattttagactccaccaccaccccaagagctgagctaggtatgatcgatggagtttatttgaattttttcgataaaaaattatagtattgttaatttatacacgaaaaattactatttatgtatattatataatagatattgaactttcatagatgttttcatgtgttgggtttttcttcatttttttaatcctcttagtggaaaatactgactcggtcactgtcatgcaccgaccaccttcaattccttcatcaccaatctccattattagtcgcagataccaattacctttgtcgtctttatcttttccactcaatcaccgctattgtcaaatatcataaccaattaaccatcgatcaccattaaacattgtatgtgattaccattagtcgactctccaagctaaagccattttatttcatatcagcacagtaatatactcatatgagctgggctaaatatcacaccatttcataccaggtgtcacgactcagaccatcatgattggcactcacactaaccctccggtggaagaaccattactacaacccaaactaacaacttaaccaaaaactatgcatttaaagatactgaatcacgtttaaatgaccaaaagaaatacggagttcccattctacggctcgtgctcctaaattctaattaaggatagaaaaatctcaactatctcaccacaactcatatcagttatattgggtatacaagtgtaaactaagaaatataactatgtaggtgcaaatatttttgaaaaaccccaaataacaagccaaaataaagaaagaatactactaaatcctacactcattactacaacaactaaaaaatatttatagtcattgaactcctatgcacattctactgcaaaacataagtagaagaagttcaaattttggccatgaaatgacaccattttctcacactcaaaatgatcgtaaatttcatgaatgaaacaatatacattactttggttgaagccccattttcttcctcgttttcccaacgtataaatccttagacttgatcatcccggggactaatccaatgatcgtcatgaacgaaaattgagccactgcatcttgtcttcctaatgaaacaataatctgacccaagtttatgcatatgtttggtctaacgttgaaaaggaaaaagttcgaatgatctggatttttttttttttttttaagaatacaaagtcgccataaagatagaaaattccgatggcattaattttgatatggatcaccgttgagaactttgcctgaggtataaatttctatttccctgtgttagaaatgtttcctgtagctccaaattgtgatgattcatttacacatttttaaaatttcatcttataacagctataaagtgtatccgagtcaattagatgttgcagacttggctcttctttgtttaattcactttcttcaattcgatcagaaaatatttctctaaaggcatattgtcgattttattattttacacgatttctgtttgtgttactttttcgattatttctcctttgaactgtgaatgcatcttaacaataatttgattattgaatgcatcttaagcgtttataccgctaacaatgatattaaaaccgttgaagagatccccttgaatggtagaaaaataaagcaacatcagtaaatagtgtaattgatcaattatgtttcaggctacttctgggctctttgacaaactaaaattagtatagattgttaatattgatattgctgatgatgttaataatcacttggctattgtgaaatatcactaaaaaaaatgcttaaatagcgggggttaattttaaggtttgtgggggtttaaaacccccgcaatatagtattgtggcaattgtaaaaactcccacaataagagttgtcgcaagcaatttgcggcagtttttctttgacccccacaatcaattagcggggttactttgcagaggtcgacccacgctaatttaaaattaaatcttttgatattatttttcagttacaaatagtgagggtttaaaacctacacaatttttgcaattgcttatattgaaagatctaggcaatcgcataagctctacaattcattcaatatactgttattcataatagaatcactaattaagctataaatcataatcaaatccaaaaaatgtctcgatgtcaagaaatatatattctttaacgacatatcataaagtcacaaaaatattgtcttatcattagtagctaaaatgacattgtcaacatcaaatatcttcatcagaatcaaacacaaaatatctaatccaacatattaacatcccctccgatcacacaatcttgtcatcaaattaattagctaagaatataggcagagttggttcactacagtataatcaacggctgtcatagctaggattattatcacccccgcatgatcttcttgtgtgcataggagaaattagttcactagcagcatcacttgactgcataaaaaaataaagtataaaattaattaagtgatatgaaaaaatataaaatccttggcgaatattatgtttcaaactatacttatcatcagttaatatatgtcaacaaaaaatgcattaaagaaaggagaaacaatatacaaatcaaatgaaaatagaaatgtaagaacattacttacagttgttgtagaagaatttgtcgaaggagaagcaaagaaccccgcaaattgttctggtatcatccctgctttcattatcatatacgccttaaaagcattcatcatttgattgtggttctcttggcattgagacgaacatcagccaaaaataacaactgataacctgcaaatactacatcttaaccataaaaataagcacctgaaactaaaaaaacaaccaccaaaaatctgcagaaacaggaatttaaaacgcacaaaatcggcaactaaaaattgaaaaaacagtagataaagcacagtagaaacaacaacttaaaacacaaaaaatcggcacctaaaagcaacaaaatagtagccaaaactgcaaaaacaatagcttaaaatgccaaaaaccagcaactaataacctacaaatacttcatcttaatcacctgaaactaaaaaaacagcaacaaaaaatttgctgaaacagcagcttaaaatgcacaaaatcagcaaccaaaaattgaaaaaacagtagataaaaacacagtagaaacaacaacttaaaacacaaaaaatcagcacctaaaaacaacaaaatagtagccaaaaatgcaaaaacaacagcttaaaatgccaaaaaacagcaactaataacctacaaatacttcatcttaatcaccggaaactaaaaaaaatagcgacaaaaaatctgctgaaacagcagcttaaaacgcacaaaataagcaactaaaaattgaaaaaatagtagataaaaacacagtagaaacaacaacttaaaacacaaaaaatcagcacctaaaagcaacaaaatagtagccaaaaccgcaaaaacagcagcttaaaatgccaaaaaccagcaactaataacctacaaatacttcatcttaatcacctgaaactaaaaaaacagcaacaaaaaatctgctgaaacaacagcttaaaacgcacaaaatcaacaactaaaaattgaaaaaatagtagataaaaacacagtagaaacaacaacttaaaacacaaaaattcagcacctaaaagcaacaaaatagtagccaaaactgcaaaaacaacaacttaaaatgccaaaaaacagcaactaataacctacgaatacttcatcttaatcacctgaaactaaaaaaaacagcaacaaaaaatttgctgaaacagtagcttaaaaagcacaaaattagcaactaaaaattgaaaaaacagtagataaaaacacagtagaaacaacaacttaaaacacaaaaaatcagcacctaaaagcaacaaaatagtagccaaaactgcaaaaacaacagcttaaaatgccaaaaaacagcaactaataacctacaaatacttacatgtctcggcgttaacatcatcttcccaatacaacatgcaatcatttggacaagcatctattttgatataatcaagactcaacttatttatggttttcttggcctcataaaaagaatcagggatctttgcaaatttaaatgcatccctcagtagatctaggatcatggtcattcccttatcacttaatctagacaaacacttaatgtgataaagctttaccaaaaattccaactttgagtacttggagccttcatacaattcttgacttccatctttaagcaactcaaataaatttttcttatttaaagcaggcgtatcatgttacgcttcttcttcttccactaccggtgatggacctacatcaacaccctcatgccttaagcccctgaatgcttcattaaccaataattctattggattttcaatgggtgatgtagcccgagtggtctctatgtttctcgaattaggaaacacattcatttctccatgcataacccaagtgacataattctttggaaacggcttgttgatcaaatggtcaaacactatatttctagtttgccactttccaaaatcacatttaggacatggacatttagttttatctgctatagctccattgttaaatgcaaaatctagaaattgattcagaccaagcaaatactccgatgtgtttcttggcattccaatccaagacttatccattgaaaaaatagattaacgtgtaataatatcacctataagatttcatgagtaagaaaatgagcgtccattagcatcacttgatgagaataaaaattaattaacaaagaacacacgatcaaagaattcataacaaaactcacacttgatgccaaatcctctctgttaatgatgagacattgtcttataaatgtactaaaaaagtataaaatcatattcaaaaaaaacttgtaatacaacaaaagtttcattcaacaaatcattaaaataaccaaaagaatgaggaacttatagcttatgcaatagatgcaatacaataaatatgaatctcgtaactttaactacctaattggaaacaaaatcacaatcaaatctcattgtgtggtggctatgtaccaacaaaatttatcataattcctttctctttttttttacagcaaacaaatacaacaaccactcgagttggttcaaacttcaaagtagaatcaacactaagacgttcctcccataaattatcaacatatcatatggtagagccttcaaaacaaattttgaaacaaaaagtacttctaggtatagtgatttacaaacaaccaacacaaaaatgactatatataatgaacatttaattctacaatgttatcattccatctaatatcaaaccataaaaaataatcgagataaattttcaactacatgaaagtacatagaaaaaaattaaaactcattttcaatagatcatatcactttcatctagataaatcttcttagctcaattgattgactatctaaacttacaaaatttcaatcagccataatcaaaacataaggagataaggtaaaagttacaactcataaaaaaatctaagtcaatataagtcaaaacaatggtcttaagttctaaaacaatcaatagattaatgtattgcaaaatcacaagaaaaaataagaatgaaaatctaatcaatagatgggaaacccatttgtgaaaataagggaacaaacatctcccacaaatgagaacccttctcaagaacataccgtttccttcacatattttaaacccatctacgaaaactccaaattcaaacaagcactaaatataaatctatcaaaattcgagataccaataccaaaatttgagatacccatacaaaaatttgagatactcatatcaaaattcgagataccaataccatatcaaaattcgagaacacatatcaaaattcgagataccaatatcaaaatttgagatacccatacaaaaatttgagatacccatatgaaaattcgagatacccatataaaaatttgagattctcatatcaaaattcgatcaaactcaaaaaatatcaattattttgctgaaagataaacataaagttgtgtaccagattgtgtggagaagctgcaaacaagaactctttgattgtgaactgcaaaggagaaataattactagaaaaatcacttgttgaactgcaaaggagaaataatcacttgtgaactgcaaagtgagatggatttttgagatgtaaaaagtatttactagaaaaattgagggaaaccaaaagaaaagcaggaatattaatgttgcgcgctattttttttttggggggatttgtgaaggttttgaccgctgccaaatacttataattacatcagtttagaaaacccctattatttaataaaatttgcgggggttggaactgaccttcgtttttaaactcccgctattcaagcattttttgtagtgtatgttgaggatatttacaaactttataagctcataaaggtttgttgaatatcatatgtctctgtttcgatgatatggggtaattactttaatgtggctgaaagagattaatcccttaatttctttcattaacataatccgtttatatacacctaatacaagagtataggcagcctataattaagaaaactaactatctatatataggaattaaatatatataatctggcagaatatattttcatatattctaacacacccccgcagtcgaagcgggaggtggccgaatgctaagactgccccaaaaatcatcaaataacaccaacggaaggcctttggtgaagatatccgcaatctgataatgagaggggacatgtagcactcgaacttggtaacgagccaccttttcccgtacaaaatgtatatccatctcaatgtgcttagtgcgttgatcctgaacaggattaccagccagatatatggcacttacattatcacaataaaccaaagtagcccgtggaataggacaataaagttccaaaagcaagttgcgtaaccaacatgactcagaaaccacattggcaacccctcagtattctgcctctgcactcgaatgagacaatgtaacctgatgtttggcagaccatgagatcaagttatcacccataaagacacaataacccgatgtcgaacgacgtgtatcggggcatccaccccaatcagcatcagcatacgagacaagagtggttgtggaagagggatacaggtgaagaccataatccaaagtaccttgtaggtagcgcacgatgcgtctgagagcgtgcatgtgctcatcccgtgggttatgcatgaacaagtacacctgttgcacaacataagtactattagatctcgtgaacgtgagttattgcagtgccccggccagacttcgataaagtgatgggtccacaaatggtatgctcatagcaaccccgagcttcggctttgtatcaacaggagtaggagagggcttacatgatgacatgccagcgcggttaatgatcttagtcgcatactttttttgagataacattaaaccggctgtatggcgagtgacaataatgcccaagaaatagctcaacatgcctaaatccttcatagcaaatttggagttaaaaagcgatatgatagactgggggagctcattggaggaagcagttaagataatattgtcgacatacaataatagataagccatagaagtacctcgacgataaacaaacaaggaattatctgtcttactgtgagaaaacccaagagtatggacataatcaacaaatcttttataccaagcccacggagcctgtttcagagcataaagagatttcttcagtaaacacacatgattaggtctatcagtaccccgataacccaaaggttgatacatgtaaacagtctccttgagttcgccatgtaagaaagcatttttgacgtcaagttggtaaatcgaccatgccttggagaaagccaaactaagaaccgtacgaatagtttccgatttgacaactagactaaatatctcaccacaatccacgccaacctgttgggttttaccatcacctacaagacgagctttatgtcgctcaaatgaaccatcagatttttatttatgagcaaaaatccacatacaccgaataacattaacatttggaggacggggcaccaactcccacgtcttatttttaataagagcattatattcatcatccatagctattttccaattcggatcacgaagagcagacacagggtaatagggtagatgagacttctagacggatgtaagaaggttgaaagacctcttaggcttatagatcccatgctgactcctagtaacaggaccagtgggtagactagagtgagagacgggagttggtcgaggaggagagctaggtgggagagtggaagaagatactgggtgtggcctagcaggcagcgacagagtgatctgcccaaccaaggaggcaaacccgctagctgggcatggcgagatgggcagtggtgcggtaggaaggggtggagccggtgggcttgtgggcgtagtgagatggctaaccacatatggagagggtccatcgtctagaaattggtacgtgtgatatggaggagtatgtaacttggcaaaaggaaattgcgtctcatcaaatattacgtgacggctaatgatgatttttgagatgacaaatcaaaatatttatacccacgatgatgtgacggatatcccaaaaaaacacatggggttgaccggggttcaagtttggttatgagtgtggagggaattagaggataacataaacacccaaatacacgaagatgtgaataatatggatccttccgataaaaaatgctaagaggagattgatagtttaacagtttatgaggaaggatgttgagaagataagttgtcatttgtaaagcatgatgccaaaaggaaggcgggagggaagcataggccaataaggtacgaacaatgttattaatcgtacagatttgtctttcggctttcccgtttttgaagggatgtgtgaggacatgataaacgaaacgatagatcattggctttacaaaaatcccaaaatgggccattatcacattgtatattttttatgtcccgctcaaagtgagttcgaatcaatgtcttgaaagttaaaaatgtagaaaaggtttgtgatttttgctataaaggaaatgtccacaagaatttacaataatcatccataaacaagacataatatcgatcggagaaactcaaaatgggtgatgtccaaagatcactatgtataatatcaaatggcataagagtgctaaaattcgaagcataaaatggatacttaacatattttccaaggggacaggaatgacacatacgaacatctctactttgattacaatcaatcaatttattcttcctaagggaatttaacacaagtgctcctgggtgacccaaacgatcatgccaaagagaaggtgtcaaagcaacaaaggtagatggtaaagtgactggatttgttattggagaaagctctctccgacagttacaccttattaccagtctctccgtctgaaaatccttcacagaaaacccaaagggattaaaattaacagagacagagttatcagtggtaaatttacagacggacaccaaatttttaactaggtgagaggcatgaaggacattgtttaagtacatgtgaaggacacggggaagacaaagtcgtgtgaccatagccgtgaattagaattgagtgaccattaccgataattataccacgtttattgctcttattaaaataagatgtgaggttaccttgtatggatgtcatgtgagaaatggcaccggtgtccatgtaccaatttgcatccggaggagtaattccaagagtatgcatcacggcttcaatgtccgtaggcataggggctgctgtgtaggcctgttgaggtcgagggccaagaactcccactcgtggtggctgctgctgtccataattaggtcgggaccaagaggtttaaggatatggacacagtggtatagcccaatgaccccaagaggccatccacagccactgctgcctgacagcccatggagaatattgcggagggtgctgccccactaactgctgcccaatgccgcggctattaccgcctcccagctgaccaccacggtccgcaggaccgccgctgctagcagctcctttgccgcctccacgaccagcattgctgcctcgagatctgacaccaaaattgctatggttgtggttcattttcccaccattagtattgtggttggaataggaattatcaggaacatcaggaggaccctcggacgagcgagcaagtaaagcagcggaggagctttaggctgctttcttagcacagccagcctcttcaagagtgagcatcaaacgggcttgataaaattgcggcaaaggatcgcgttggcgaataagagtggccacactttggtagggctcagtaagaccagagaccaattgaagaagtagacgatcgttagcaatcgaggaaccgacattcttgagttgattctccagagatttgagatattgacaataggcagagacattcggaaaatctgccatgtctacatgagtgaagtcgtactcaagggtgacagtacaagagtgtttgttatcttgaaatatatcatgcaagcgatttcaagcctccatcgctgtggtgtcgggttcaagaattatatgcaaaagatcatgagaaatagtagtgtagagccattggagaacggtattgtcaagggtggaccacagttctttgtcctcctcttgttgaggtcgtttctccgtgcccgctgccgcaggaataatatgataaatgaccctatgggatcttgtatgaatcttaaagagtttcgcccatgtggaatattagacgttctccatctcaagagtgatgggaacatggttcttgatgttggagacaacaagagcaggatgaaaggaagatttggagttagccatggtgattgagaagagaggaacggaaataggagaagggctgcggcaacggaaattcaagaagaaagaagaaggttggattgtgccctagatagctgataccatgaaagagattaatcccttgatttctttcattaacataatccgtttatatacatccaatacaagagtataagcagcttataattaaggaaaccaactatctatatataggaattaaatatatacaatctgttacaatctggcagaatatattttcatatattctaacagtggcaaataatagttttgtgactttactgtgtagtgtataaaattcatgttattttgatgatttggttgattcatgatgaacgtcaatcgtatgattacatgaactagatatccagtgtaatctcacaaatggggtctagggaagatatcaaggttgtttctgataaatccttagttgtagtttctctattgcaacaaaactaaaaaaatcaccacccttcacatatgctcgaaggatgcagcccatgattttttcgtattcagactaatactaatccaagtcatttcaagaataaaatgtgatcaattaccctatcattatctagcaaggaaaaatcaaaggcgagatggaattaaaatggcccaccacatagagaaatataactaactaatcataagtcaaaggaacttaataccactattctccaacttggagccagtctttctttcacactattactaatataaaaataatggtcaaaatcaaattcaattgttaaccgcccttattgaaaatatagaattgactactgattcttaaggaacgcatttccactaccttttgaaaccacaaaaaaatggacaaattccttttcttggagacacatacataaaacgaggtgaaatatgttctgtttccaccagagttgtttagattgcatcaatttcacttccacattcttgttttttaaccattctaaagtcttgtcagacgctttggatccgattttaattttgatctaattaatgaaaaagggcctaaaatatccttgaactattaaaagtggtacaaaattatccttcattcacctattagccccaaaatacccgatgtctacatttaggtcccatattgcccttatggttaattgcctccaacttaaatccaattaataaatttattatatgacatggcaattatctattggtcaactttaaataatctaaactaattgaaaacccacttattctcaaattagacccaaataaaatgtacccgccccaagttcatttaacccatcttcctcacatgctttttcgaattgaatcccgaccttgagtttgaacatgtaaaacgatatctgatacataacttgatcattttgtaaaggttactgtattagacatggtgatgatacaaacattggttgatcataaagatggtgaaacaagttatgagttcttttattttctttttatgctagtctggaggaactctaatttatagtagactctgtaatgctgtgaaatgggagtttcgatttttgctttttcagataacaattactgttgtttacctctaactatttaattaagcgcattgctcagatcttagttacttgttttggaagtccaagaaagtggtatgtattctatatttttgggcaacgattgcataaataaacagaaaatcataatccagacaatgacacaaaattctcatcaacattgcccacttatatttgatgagaatgaaactaaatcttttggatatactttattttggattcattatataagttcaactcaaaaatttacccaagaaatatcataatctcctttatgtaaattggttttatttctttttcaaagaatgtaggtgggaggaaaataagaaaaagaaaagattgtagcttttatgctctatgatttgccattttgctgtgaggaagacgatgataaaagatgggttaaatgaatttgggaatgggtgggttttaaaattaatttaggttatttaaaagctgaccaatagaaaattgccatgttattaatgaatttattaattgggtttaaattgggatcattaaaaataaaggcaatgtgggaccaagggtattttaaggctaataagtggatgaagggtaattttataccatttctaatagcttaaggatattttaggtcattttccgtttaattaaacactgagttttttttaattaggtgacgtggatctctaataagaggccacgtgtcacaaatggtttacaaaactagaatatactttctgttaaaaaataatggcacgaatgaatcataatttttgtaacgatagtaccatggatgagccaaacttttatacaatgacataaataagctatttttaataattcaatgacatatttgagcttttttccttatttcaaacacttgttactatttccaaaaaatacatatactaaaattgcaaatgtttgctctttctattctcaaactctgtaatatttaagaaaatgcttcttctttttttaggcttaagtcatcgactgccacttaaagttgtccccataatttatttgaacacctcaactaatgtttatatctattgaacacctttacccctcagaattgatatcgttttgatatttttttaataatcagtaaaaaatttaaagtgtgtgagctacactcgcgatgacatgccacaatgacgaattaaattgtgacaagtgtcatttgggttcaaaaaattatttaagaaaatattataatttctttaaaaaataaattaaaaaaataatagaagagtaaaaattagccctacacaacccacccacccaaaaccttctagtaggaatcaacggccaccacagtccgtccaccaattcgcttacccatccgtccaacatttatttctgtaatcaacaccatagatgtcatctaccctatcccttttattctgatttgcgattttcatcactatcataattgtcatttctcctatctcattctcttcctcaaacatcaattaaaatttgtcgataatcttatattatgggttctttagggtttgaattctttaacaatttcaaacaaaaacaatcaaatttgtactattctttcccgaaaaaatggaggttcaccgaattttttcacttttgacccaatctgattttattttcttgattaaatttccttcaacaactttaactcttttgaaattttcaattagattttttcagatttatatcagttcttttgatttttttttatttgactgtcatttgtttaatagttacttttccgataaagataataatgacaatattgatgatggagaaatgatattagaaaggaaaaatgaaggagaatatagaaaggggtgaaggtggaacaatggcagaaagattgggctggtgaagaaaggtggaagattaaggtgatgtggaattttgaggaagaagactgctaaagattttcttttaactttttttttttgttttgaattttgctcaacttttaaaatgttgacatgtcaatatttgaatgacttgtattagtgtttctttttgcttcacgcgcttctcaagggtgtaatacgcctttgatgtcattttatcaaaaagtacttaataggtattctctctgtctaaatttgtgtaacttacttttttttttcgtccattttaaaaaaaagacacgtttttatattaagtaataatttaactataaaatgtctattttattcttaatgaaatgatttacagccacacaaatttctatcatttattttggactataagttttaaaagtcttcattttttttaaacgccgtgccgagtcaaattacctcacataaaatgggacggaggaaatacatgttttgaataagataggtgttcaataggtacaagcttcaattgagatattcaagtgaattatgaggacaactttaagtgacggtagatacttaaagattttttttttttttaatgttatcaggcaaaatgcgacttgacctatttatagaactattaatttcattttatgaaaaaaaaaaataattttaaaaatgatgttgggttttttcttttctacaactcatgtctactttacgaaacaagacaaacactttaatgaatgagtccccccccttgggttggcacttgggtgaaagtctttgtcaggtgaaaagtcttgctttttgaaaaagagcaaaaagacaattttgcttttttttttttttaattagttataatggaatttatgtattatttatgcatgatttacttatttatgttttagttattttgtcttttattccacataaaataatactatatagattttctcatattaaaatttacgtgtattatttatgtgaatttctaaattataaatcaaacacaatattagttttatacataaataacttatcccttatccaaatattaaacattttattacttatacacttgtataatttattttcaaaccagctaccaaacaacccataatcagcatcaacaggtaaagtaaagttcctttagtaattgaagatataaatatttatcttctcaaattaatttcttaaaatcattttgtggttctttgttttgctttgcagatgttgaagatgtttcaaaagcatacaaatgaagttcagatcttacagaagctgaggatgactttctttggtctggaggctgtgctaatatttcgtaatgttaacgtcatgttttaatgttagtgtcttagtttacttgagcacaaagtttacaaaataaaatgagacttttaaaattgtatggtcttaaattaaagatatgtgtagtttttaaaattttattatcttaaatttacaagtaagaatttaggaattgaaagacatactaaatataagaaagaaatactcttttttgagacagatcaaaaagataagtacgacacttaaattgaaaccaagtataaaagtcttaacaaatttattttgttgaatctaatttgcttcttcaaggaacttgtcactaaatacattgtgcttcaatacacatttgccctaagctccaatctcttccactaaaagggatgccctcttccctctctaaactatatatttacaactgcccattgctcaaaccactactagaatttgacaatggggaatactggccaaatattgctcaatttcccaccatagagatccatcgggattgcatgtgatgattaaaacgaatggctcttcaactgatgtaagctattcttttcccttggaagctttttattttcgtttacttcactttgcttttttgttaattcttttcatttttaatcactagttttagaactatgctttgcacgtttatcccaaaatatttcatatagtttttgtatagcaaatgacatattttgtccccttcaaatctattggtatttactaaaaaaatatccaccatttttacgatagaaagtacatatattttcctaataaaaagaatacacacttaattataaaattgactcagagtgcataaaaaaaagtaactaattattgtacaaatacaatattccaatgaagatactaaaatcccacatgttaggttaatgtatacaaaacaactaacccatgtaaattctcaatattaataaccataacacaataacaagttatacgatgaccaatgacaaggaacataaatattaaaacaaaccaataaaaagagacaagagaagagagcatagagattcttttttttttcaatttgttttaactgtgtacaatattgtgtcaaatgtcactattcataggataagattgaagaacacttagagttgttatgaatataacattaatccatttgatcatggatgagaggtggtagtaaaaatcataatgaatataattagtgggagttgcatatattctcataatgaagagttagtggtaataaatctatgaatgaagagttagtggtaataaatctatgaatgaagagttagtggtaataaatctatgtcatatacttaacattaatacaaatatttatatacaaaaaagaatataatatagatctatatgattttttttcctttttgttaagggcaaacataaccattcatatttccaattggaagatgaacaaagcaaaaacttcaagaatttaactccagcatgaaattaacaaaaagaatacatattcaagaaactttatggtggttgattcatgtactaatatgatgatttacgtattaaatatttaatttattaaatagtttataacatttaaatttaatgtagaaatagaatcataatctaacttttgcctaacattctgcccacttttagtcaattttcctttttgcattataatatggattgcacacaacaacttctattaaaaaaaggaaagacaaaattaggaaaaatagtatcaataaattggaatgaaaaatgtaaaattgtaataagaagaagagaagaaaaaatcagtagaatatatttacctaaccatgaataaggaagtatgttgagtaaaagaagaataatgcaaaagtgtgagctaatatatggaggaaattgactaatataataatctgtattgaatactgaaagaccacacttcaatttctgccaaatttttataactacgagctcaagataatataaatttattaatttaataatgacataaataaataatatacattgtatatatgtgtagttaatggggtagtgaaaaaaactctttctaaaattatttttttctttaaagtatttttaaacttataatattagtgctatagaaaatcatataaagtcacaagctactgcaagtttttatagtaattattttattaaattatatacctattatttatttttaattatttataatcattccgaacatgtataaactaatttttggaaagcttgtaaaatgagaaattattatttcttatcgttattttagctattattaacatttggtatgacaacatttaaaaagtagcctcctttaaatattaactgtttctaaattaacgtagccaagaatttgaaatgttttgacgttttgtttgtctaaacacgcagaattttatttttgaacttgaaacatgtagttaagccttgggaattataattttatttttactatttaattaattaaatattttataacattttaatataatgaaggggcaaaatggtaatccaactttaaaggttggagcttcccacttttagtaatatatgatatatgatgatatatgatgatgttgtgctaatcatcaaacacatagctttatatttaagcttcatagagaatctaaattttttaaaagataatcagggataacgatcacaagttttaggaaataagtgcaacgtccattgtcagaataattagatgttatataattctatcactaattatcttacaaattaaaattgaaggtcttcattacccacatttagtacatgaatatatgattgcattaagatcttgtttgatgcatgaaattaaatataactattacttaatatttaattaattaaataggtattaatatttaatttatttattttagaggtaagataaagacataatggtaatccaactttgaggttaagagcttcacacttgtaataatactaatatatgagcacgtgtgtttccaattactttttatatatagatacgttagaatgattacaattttaggaaagaaattaacaataaaatacaacaattacaaattaattttaatgtttaaaattaattaagcaaccaaccataaattttggactataattggcagttagcaaacttccaatgaaatcacaaagggcgaatttgagctcaacaaagatatacacacttactgcaatatgaaattaatagaaaatcaaattaaagaaatttaatggaagagaaaatacacaaaaaggtagagaaggaaaaaatacaatatacacatcttttttaagacttaaatcacaaaaatatagatggaaaaagagtcatcttcatcgagttaaactaaaacatgagccaaatagtacaatactgatataagtcgttactttaactatagaataaaaatgataatatttttgagtaggggtctcatgaaataaaaaagatgaatgtatatagataaaaattaaggaataccaaaagataagttttaaattaaatgtttgaaggttatgaatatgaaaagtatgaaagttatgactattaatagtaacaattaaatagataattagatattatttaggaaggtgaatatttatattatatatatgtgtgtgtgttcaatttgaggaatgaatttttcaacacatgaataatagactaataaggtcaatatattatacatataaacgaaaagttaaataaaaatactgcctcaaaatcacatactatgatccatcatttatctccaattcggtggcccattttatattaggatatgaattcttttattttaaaaaagtttagttattcctctctctactcataaataataattttgaaaatatatttatactaaagtagaacactcaatcaagagaaaaataaccatatcaaattaactaattaatctttcatcaataattggtagaacatgaattttatatcacatatatcttcatgtatgacacaagatatttcaatagaaaaataaattcataagaacgtatatcanaatataaaaaaaggacatataaaatacttaagctagacaaggagaagcggataaaaacaaaagacaattaccgcacatacaaaatgatgagtaagattagttttttgcatgataatctctcatcctcctcctattatttacctgaagaccatgctaatcattttatagcagtagctaggatgacctttgagtagataaaattaatttgcattaaattagtttaatgaatctagtccatatcaaatttatttaatgaaaaaactcttcaaatactcttgatttttacagaaaaaagagaaattggcttttaatgtgaatttgattcatgtattgatttaaatgagtttaatttaagaaagtgcaaaagtcattaacatttctattaaaacgatacaatttaatatttaaattaaatagttaaatgtttttataacattttaatttatagtaggggtaaaatcataattcaacttttcactattttttattcccacttatagtaatactagtctctggacacgtgtgttgcacatgtgtttcatgtaaatttttatagattcgttagaacaattaacatttatgcaaatcatgtgaagtgagtaatattaatgtgcgtcaagaaacaccaaatgaggggcacattgtaatgtttaaaatcaattcatttgaagctatcatcggtaaatcaattccgttgaagctattatcggtaatttttgaactttgtttagtagttaacacacttccaataaagtcacatgactaatttgagccaaataacaatacatacttacgataatgataaaaaaaaattcataagaattagattggtgaagtctaatacaaaaaacacacacaaaaatagaagaagaataaaatatacacattattcgcaaaactttattcatatagattatgatagaaaataaatatagaatcattaagttatccatattcgaaattcggaagctacaagtttaaagaggaaaaacaaaaggcacagaccatgagagggaagtaattgcattgacaaatcctataatttgcaaattatgtataacgaagtacgcatcatatttttctccagaataagatagtacttatttctgataaaaatagagacaaaatttaccagcggtgcttgacatcatattcactgcttcacacaccataacacacacacatatatatatatggaacatgcgttgcatatatattttcaacttttattataaactaggtaatttacccgcgcttcacgtgggcataaataatctttctaagcttttaaacaacctttccaataattgactgctattaaaaaaaaaagaagtaaatttttgtaggtttttagaacatttcaatagaaataaatgatttgacattatcacatatctcaaaaatcataaatatataattaatgattaaaaatatcttgatatctaatcatttttatcttgggaaaaaggacaaatatatcccccgaattattttaaatgatatctaaataccgtccgttatacttttaggacactaatgcccttgccgtctaatttttgatatgtatatatctttttgactaacggagggacacgtgtctcaatcttaaagacctacccgaattttatttgatttttacccataattaaaatacccacccaacaaattcaaaacccacccaaataacttgaacctacactgaaattataatccaaaaacacccccaataatcttcactttcgttacccattcaattttccaaattagaccttatatcaaatttcacggaaagggcaaaaaaaaattccggtgtcgacaacggtaaaagagaagaaccccatatgggtatagtaggaaactccatttattgatttaaaatgatttgttgttgttgttgagtgaagtgtcttgcttcaactgccatggaaatagacctaggcaaagataaaagcgttcaagttgactgagatttcagataaaatttgaatctgctcatcaatctagacctcaaagtgctcaattcagttttttatgaagcatttcgatcttggaatttgtcttctaatgtagtgataggttttagatctgacctttctgataaaattttgatattttcatcaatttagtcttcaaagtgttccattacttctttaagcatattaggacttgtaatttgttgattgaagtagagagagttcttaccccaagattgattttttttcccttggaatttaaaagtttattaatgttaattttgtttttgatttgattatttgatatgcttcagtgtgttgcttttcatttgagatgtatgttgtggcctgtggtatcaagatttgagttcttttaggaatggaaattatttttatttttgaaatgggcatatgaagatttcgggttataatttgggttgggttttagttatttgggtggatttttttaattatggataaaaaaaaaaaaattttgggtaggcttttatgattgagacacgtgtccctcggttagtcaaaaggatatatacataccaaaaattagacggcaagggcattggtatcctaaaagtataacggaggatatttaaataccatttataataattcgagggtatatttatccttttttcccttttaattaatgataaagatggaagacttgtagagctaattcttctttgtcataatgagaaattattgaaattatggaagacttgtgttttcccttaattaaataaataaatagtagtacttgaaccattaaaaaccaacaatgaataaaggaaaagtcaaattacatttaaataatgaattaattctcctaaatctatgggatctcttgaatcatctcaataattactttggtctcttttcttattataaaaatgatactataaatagggatttggggtttagaaattagagagagcaaagttaattaattttcattatggatgcaaatcgccaagagtgtatggtctaactttcttcacttttgatgattttgcattgttaaaatttgtttcattaggtttcagcatgttataatgtgtttattttaaaacttgactactactagtgttaccttttttttttttttacttatttattgtgtttcttataatgtccagtttgctttgatacatgcttatgttgagttttattttcacagatctcgtacgtgtatcggcaaaaattcgaactatgcaaattatcattcaagatgacacgttcaatagaagtattattcaatggcgttcattatatatcaaaatgttttttacctcccaacaacatagatggtactaaagactgtccaaattgttttaccttaatggttcatcgaagaaatacaataggtgtagttaaagcatacattcaagaggaaaagcagattgcttttaagaaacaaaagcttttcatgagcgtggatggtgaagttttgagtgatgaggaaactctacgcacattaggaatcaagaaaggttctaccttaattctccgatatgcaccgataacacaaatatctatgaaaatgcttatgttgtgctctattgtcaaagatccatgttcattaagtcgaacaatgcaaatcatcattcatgattatacttacaaagactttatggatggtactactaaacaatgtcatatttcttatactttaatgattgcaccggatgatactattgttgcagttaaagcttacattccggagcaaacaggattgtcttttaagaatcaaaagcttatgaatgaggttgcagttttaagagacggcaaactcttgtttctctaggaataaagaaaggttcttccttaattcttcgatatgcaccaatatccaatgacaagtttacgagttgtgttattaatgttaaggttcaacatggtgacaccgttggagatcttaaagccatccttcaagaaaagactggttttcgatttcataatcaaatattaatgtatggtggacaaatattagccaatgaagagcgtctcgttgaccatgataaattagtactgttataatgctcttaatattatcttaaacttggattatattttctgttttgtacttctttctatattattaaaaaatgcttgttatattattttatgtacagatgagtgaaataatccttcgataaatttgcgcattatttaaatttcaaactccaattttatcaagaggtctcgtagtatctatttcaaacttgatagaacgatgaataaataataagaagtggtttgaattacatttcaaactacagataactatttatatatacatagataattacacgttaaaatattgacaatttcttcacattaacatttccaaatttgcacatcagttaatagtctgattcatgtagggcacgaacaacctattcggggctctgattatgctactaacctaaagttgaggaacggggttcaccaccatgtagatccgcccctgtttggacatacattttaccatctatttagatggtactgggaataaatcttgaatgtcaaggcaggatatcagctaggataaccaaaggttgtttcgcgtaacaacaagtgtatatctcctggccacctgcagaaaaacgaattgcagaccagaagagaccttgaattttaaatccagaggggaactggcttgaatgttttccttttaagtaaccatgataagggggaaaacaggataagcaaatgataatcacccatcactctactagtttttcgttcttctttatttaaaattttttatattaattacattcttttagatggttaattcaaaccattaagacttgttgcagttgacattccaaaacagaataaatgtatcatattgtttatgttggcttataaacaaagaattgagtggtcttagagtatcggtttttttattcttagccatttccagttgaatagatgcttttaaagggagtgtgagtacacaataatcgaagaccttaacctatttctttccttccttttggggtctactttagagacttcctcacttgtatggatgactagaaaatatatatagtgtgtgtatatgacatggtataaaacagccttctcactattcataaatcaaagttatttagtgatcgatagtcaggggcggctcaacgtgattaggggcctaaagcgaaatttcaattttgggcctaaaatataatcaaacttcatatacatatttatttaaaatttatttttcttacactatttagataaaaattattagtattttaatattgtttttttaattattaattttaggtaagattttatcaactcaacattgataaacatccttttagtgagataattattatatgaattgttaacataattatacaagtaataagttgataaatattaaatagagataagatttagaaccacagaatttgacgcaagaagttgatgacttggtataccccattttaatatgattgtagtaatgcttgaaactaaaatttaaaacgaaataaagaagaatttgtaattcacttttcactattaattcttatttttaacaaagtacaaaagatgttaaagtgggtaaaataatatatttaaaaaaaaattatactttttataataaataatcaattttttctataaaaaatttaacacatgatttattctttataaaattttgggcccccgaaatttgggggcctaaggcaaaagccttatttcccaaagcatagagctggccctgtcgatagtttagcaatctggtggaggtggatcaaataaatttagaccaagttgaattttgagatatatataggtagattgttatagctgactgcatgaacttggtaaagagccttaccaaccataatcaattgatctattattgactgtatcacactaatgattggacttgttccagatacttctacaccagttcatcttacttctcattctatatgttggcacggtagtaattcatcagtactagtaaataaagggtgaatgtgttgtgattttgagttccttgactcatgtacaaatagtaatcacaagcagaagcagagttaagtacattactaagtgattgacaagtaccctcactgcctgctgaaggctctttttagttgaatacatctatttttgtatgtatagaactcgagtagggattacataatgatggaccgtaagattgttttagggaacaaaaggacttcccactggaattctggttcagtatttttcccattcaatggaaggtaaactagataggtatgtatagtcacgggcccaacattttgttaagcaaacacccgtactgatcaagaattgaacaaaaaagggcaatgtacacactcttctcatactgataaccttgataaactcctaatactgatagcccttgataactcctaggtttaggatgttaaccaatccccatgattcgccattgtcagtctatataaaaatggaaaatttggttaatatattgttagttaatggtaatgaatggaagtcaagaatcaaagagacaaatatcaatcttagagacataaggtttctaggttgagatatcaatattccacaatggtaaaactgtctattagtttggcaactttcaaacaaagaaaacttaaagacattgtagtagtaatcatagagaaaagaataaagatgtaacaagcaaatttaaccaaactattactagagaaggcatgtagcaatttagaatacaaatttagatccttaattggaattaataaccaaagcttttgagtagatcagagtaaaaagaggaaaggctgaactaacctgttcataactgtagcggcgaagaacccaaaccataaggtttcagtcagaaaaaatagcagaagatcagaaaaagaacaacgattgaacataaaaacccacgaaactgaaaataggatagcataataccccgacacttattaacttcatagttctcttctaaagcaatgaggtttcctctgtggagtgtgcctgtgaaaccagtacatacatacccatcaatttaaatccacgtcagcatagctacattcaactcaaaaacaatacaactacattctaagtgaccagacacagagttatgacgatagaatatagaattcctgatagacaaaatagtcacttcctggacagctaaatttctatcatacgctggaagatagcaactgattaagagcgtattggtctctatacaaacatcatggtctcagatatttgtgtttatccaaatgcttgaagctgtcttaaggagatacctttggactgggaaagcagaaatgtcaaggaaaaggactgttagtatggggaaaagttttgttatccaaagacggcaggtgggtttaatgtcactaatatcacaacctggaatcgagctagctgccatactaaaacctgtgtaggatacaaatacacattctccaatccaaacataatttaggaactaattaatcaacaaaattaagatacaaatacacattctccaacccaaacagaatttaggatctaattaatcaacaaactttagcatataaatacacattctccaaccgaaacataacttaggaactctaattaatcaccaaaatttaggatacaaatacacattctccaaccaaaacagaatttaggaggataaaaaatttatgcgctaatgaagagaatttaagagagacctttagtttactcatcaatttgtttttcaaggttttccagtagccgatgttgatcgccggcggatgagatggaacaggagcagttatttgtggaagaataggaacagcagctcttctgatatcaaaatccaaaaatctacggttggaattggagtttatccctaaacaaggacggcaccagttattattccttctttgaggattcctcagaacaatcgccatctcaggagtaatttccgacggaagagcatctgtcactgttatctcctccgattccgatggtggaggatccaccggagtaattgtaggcctgacaggcaaatgcctggtttcaaactctatgactgtttctgggaccgattggatcaaaggacattttcgatggtactccagcaccgaatgatggtattattggagttaaagcttatattcacaagcaaattggattatcttttaacaatcacaagcttttgtacaagcgtgcagttttaaataaccctcaaactcttgtttctctaggaataaagaaaggatctacgttaatccttcgatatgaaccaatatcgagcaacaaatttatgagttgtatatttaatattaaggttcagcgtaatgtcaccgttggagatcttaaagccatctttcaagaaaagactggaattcaatttcatacactgagatcaacctatctatcatggacaaacattggctaatgataagcgtcttgtagaccttgataattagtattatagtgttcttactattatcttaagcttgaattatatttaatgttagtacttctttctattaatctttttaattacatcaacaaaggtgattttttcttatttcaaacttaacatccttgtagattgtcttatcttttattgactttattcagatgaagccaacttaaattaatctatactagtatagtttgacttgtataattaagaaaaaaaaatcacccccactctgtacacttattttcttatcaactattttctacagtaaaattttctagcctaattaaaattaatcagagataaaattaagaaaacactttctcaaaaacacattgtttcttgacgatctcttcacgccaaattggtaataaaaaatgttgttttttttgaaagaatttaagaaaatcatcaactatagactagtgtttatttttgttgggtactatactaataatacagaggttgcatttgcgagttgtgggtgtgtgtgattgcaaatcttttgttatggtatataatgtttaatctttgtgagttgttagtctattttgttgtatgaaaggaatttttttttgtttatcggtagggaatgagtttggaatatcacatttattagacttgattaaacttcattgtttcaaggtgttagcttttggggagttgcttcacagtcagattccttttgattgaaattcataccgtggcgcattctaaactaggggtctcaggttcatccttgagaatggagaaactcttgatagggaacgctttacccccttagtaggcctacccttgtgtcaatcgtattatttggaccagtgggtttcggatgccagatggttagataaaaattgaaaaaagtatatccagatctcttgaataagcaatgctaagtaatccaagggatctgatatgtagagcactaattaagtaaaaaaccaacttcacttgtatttgagattcttaaaagcctcatacaggttaaacctttctcttctgctttaaaagtttttcttgtttgactttccaaacaatgatatgggatttgtagcacattgtgtttgtccaattgatccaatgacagtattctcctagttcagtttatacttgaccaagcaaaggtgtttgaaatttctctatgtgtggtaggttgatgctggtcttcctgtcatagcatccttaaatcgcataatttcatcaggagaatcccgtctatcatattattgggagtttgagtggtaatattttatgaccacttaccatttaggctatatatgcaatagcaattacttatccttagtgattattatcttgcttgttataaacatcaggagcatttgatgggaacatgccatatgtcttggtatctaacagctaccctggggtgtgtaatgagtgaggtgaggatggaaagccattcagccaagtcgttaatgctgctaaaaaccttggctataagttacaaccaccatacgagtattgaagatatgactcacaaaaacagaaaagtggctgttgaaaatatgatatatatcatccatgtataaataagtgttgagtctcatttttccgtctagatattgccctttctatgagtaattcttctcattttcctctaaggcaactgttcctctggtacactaatattttctggccttctgcttaggaagtttgtctagcactaatttgaatgtgagagaagtcagagaaacatgagaagcaattttatatgctcactttacgatgcatctatttacatctatccaatatggtgaacatgcacatacaactctatattacacaactatctctagtaagtttcatttagctatccaactctcccctctagttggcacatatatgagcttgctatacatgtaacctgtaagggaattggtgaatatgtgtgtaagctgatcagttcactttacaaactttatagcattttttggggacagtctgtatttatatgcttggccttctagtgatatactgcatacaatgggatataagtacaacttgattatcacacacaagtttcaacatgatcaatatcaaggtcaagcttgctcactgatggcaagttaaggtactgatgaatgatgagcaatgaatattatcgtaacagacaagtttatcctagaagatatctgtactcctctacaaatgctttagaaagttaaaggcaacatttacccactttgacatattagtttgacaagtatctccaaacagttgtattggttaatctctttcatgttagtagcacgacgactatgaatttcactatgcctttgtccatctggttgactgttcagctctcccacctgcagccagttagaagaaaagaataattactcactttacagaataattaccaacattttatacactctcttgcaggctactggaagaaaatttggaaaagctaactgggaaagagttggagaagcatatgccatgcacgcgaggctactctacaaaacaaatcattcacattggtgaaatggataactgatggaattgcatacaaagttgtagttacttgtgtcctggcaggacacaagtaactgcagctatgttacacgggcctgtctaactcgagataaccttgggatcatcctcaacaacaaatgctacttctgcaggaaggataataaaactgttaaccatctcttttaacactgccctacaacaactgaccgtggcattttttcagctctctgtttggttttcaatgtgttatgccattctccattaaagatgcctttgctagctggataagctggagagctaataagactttgatggaatctcaattcccactagaaggctaaatgtttatctactctcttcagttggcactttttctttcccttgtgaataactttttcgattttgttactatccctaactttacatctcgttgatgcgataagtcttaacaacaacaatctcaattctcaaatgcgtcatctattgacagagatgacacttagttagtagagatcataccttagttctctgcaattgttttcccagtaatgcattttgctaaatttttccatatcaatttaggtcttggatacatacatccactgaaaacaacaaacaacaaacatcataacaaacaaacaaacaaaaacatcatagcaaactaacataaaatagtcgcttacgtgaattctaccatgtctaccctacgctgttgattgttctcctgttgttcttcagtaatctctgcgttaagctgttgtccttcagtaatctctgcgttaagctgttgattggcaagctgttgattggccggttcctcaatcctatccagattgacagtttgtctttccccttcttccggctcatagtcccaaaccggtggtcccagctcctcctcaatctcctccagctctgaatcacaaacaggaggaccgggatcgataatgtcctttgatccaaacaccacagtttcatcagtagtttctgtctgtgtggctgggtagaaatcaaatgcatcaccagttgtggttgatctctccgactcaagagcatctgttatgttgtttggatttgaaatccaacttgacaacgattctggcaatgatcctgttgatgaatctgttgaatcctccaccggcagtgaatcctccactggcagtgaatcctctgtcggaagttcggccggaatttcacccatcatttcagacattttatttttgaataagtcggagacgatttcatgcagttccatttcaacaaactgattgaattttgaattttttgagcgtacaatgaattttgaatgtatgagtttacttatatagttgctaagtaaactggtggagtggggtggggtgggatgtaagaaattggcgggcaacatgagttgtacgatgaatttttttcattatgttttattattaccttaaacacgtcttaaatgaaccatgttattcctagatatctttagcttttgttacattgtgatggaacaaaggttggatataagtaattattctttcataaaacttcagtttaaattatacccctctgtttcagaaaaaaaaaatgactcatttccttctatggcaacactttaactttaatcttccacgtgacatgtttaaagcaataagattaaaggacattttgatacatttgatataactttaatttagagccacaagattgaatttttttttcttttcttaaactccgttcctagtcaaactaaatcattctttttaaaacgaattgagtactaactttatcacaaagacataaataaggtaaaaatatgtggtattccctttgttttaaattttttgtctaattttaacttgatacgaagtttgagaaaattagtaaaattttgtggtcttaaattatatatacataaaatatattacaatgatttataattttgtaatattaaatatctcaaaaaagaatggaacatttttttttaaatgaagtaaaaagaaaactaacaaaaataaattaagaaaggcaggattaataattaaggtttagttatctgaatgacgtgtcatgtattcctgaattgtttgtttttcctcaattacaattttggtccttttactcaccaattcttcatattttcttgttatggatttgggtctgatgacttgaatgagtccatcatgaattatgcagaaagtaacacttgaaagtaaagaataaaagatgtttacgaggaaacttcagaggaaaattcatgacctagctcacaagattttaataataataactttattagttaacacactaattagattcagattacaagctcttgcaatttagtaattaaatccttaatcccttctcttcgtaacaactttattacaagacaaaacaaaataatgactttattgtgcagtgtccactatataactaaactctaattaacatagacttcactcaaaactcgacaaagctaactctagctataaactcaacttaatgatgattacaactcaacttaacaatatattattatagcataggagtagatcttacacagttagaacaaaagacattaacctcacgttacaactaaaaactacacttgatcccttgatcaggttccttcttgcgtatgagaataatgctttatttagagaaatttgcttttgccttttttgtgaaaatctttattgctaaaattaggtttgtttatcatcaaagagatcaatataagatggacaaaagcaacttagtgcaacgccattgattgataactcttcacctttttttccgcgttcaccaattattgcagttgtgtcagctttaagcttatagaattgacagctaacccaaccttattacttgtgtcatttctagttgctaataccatctccaacccaacacaaaatttgacatcaaattatatatctggtgtcaaatttggagttttgagctccaatccacactaatttttacatcaaatatggtttgtgattcatcacaccaattcattttttgaatattttaatattattttattacacaaacttttaattaaacattatataaattgtatgttttaattaaaactcctgtatatttaattattttttatgtaatatttttataatattaattttgaactcctcttgttatttagaatcaatcgaaacaacattcaatctaaataactaacaaacttaaaatttaatacaaagctaatcatattagaagagacacatatgaggtgagaaagagtgggggaaaaaagaagtaatttattttggtataaggtaaagaatgaggtcattttgagtaaataatgaaagtcttggccaaattatgataactaaaattgtggaccgtacctttgggcaattctttttttaatggatttcttacacaaataccagataacaataggagaattctagatttaaagatcaacgaagaatcattattatactctgtaggctctagcaacaaatgtgtccaattgatcatagtagtataaagagtgaaattacaaatttatagttcaagtatgaattcaaaattaataagtacttgtatttttgcttatcaattgattgtgatagctctatgattgttattatagccgttaaatcataaacaaagaataataacaaaaattcttatttgtacaattgattgttatcacttgtatcaattatattgtgtatatacaatttatatatttggtatactaaatgtataacaatttgttagtatgtggtacctcaaaatgtacttatattgacaaaaatttgcctaagatcttcaataattattgcacaatgatatattattgaaattatcacgttttttgtttgtctgcaggattcaattttccactcttaggagatttatttccttttattgtgtgttttccttaattaaatgaatcaatagtagtacttgaaccattaaaaaccaacaattatactcaaaaaaaggaaaagtcaaattatttttaaataatagaattaatttttccaaatttatgggattctgaatcgtttcaataattatcttggccccttttcttataattaatgatattataaatagggatttggggttaattagagagaacaaagttaattaattttcattatggatgcaaaacgcaaacagtgtatcctctcactttcttcacttttgatttttatattaaaattctatgattttgcattgctagtatgctacttttttttaattatttaattataatgtcctaaatattatagtttgctttgatacatgcttttgttgagttttatctttacaggtcttgtacgtctaaggtcagcaagtggatttatgcaaattatcattcaagatgacactcaaaatattattcaacggtattcattatcaaaatgtttcttacccaagtttggagctcaagacaacatggatggtactaaagaatatcaaaaccgttttgccttaatggttgatccaggaaatacaatagctgtagttaaagcatgcattcaagaggaaaaacatattccttttaaaaaacaaaggcttttgagcaaggatgggaaaaatttgagtgatgcaaaaactttatttgcattaggaatcaaagagggttctacaataattttgcgatacgcaccgataacacaaatatctatgaaaatgcttatgttgttctctatggtcaaagatccttggtcaatgagtcgaacaatacaaattatcattcatgatgatacttacaaagacgcgattggatctaagtacattatagatggtactactaaagattgtcgaatttcttataccttaatggttgcactggatgatagtattattgcagttaaagcctatattcaagagcaaactggattttcttttaagaatcagaagctcttgtacgagggtgcagttttaagaaatcctcaaactcttgtttctctaggaatgaagaaaggatctaccttaatccttcgatatgaaccaatatcgagcaacaagtttacgagttgtatatttaatattaaggttcagcgtaatgacacaattggagatattaaagttttctttcaagaaaagactggaattcgatttcatacactgaggtcaacctatcgtggacaaatattggctaatgataagcgtcttattgaccttgataattagtattatagtgttcttaatattatattaagcttgaattatatttagtgttagtacttctttctattcatctttttaatttgtccaacaagatgattttttcttatttcatacttgtagttatttttaattttcaattgtcccaatttgtttttggcaatttttgtccactgaaatttaactaaccttcaaagctaaattgaatcatttttatgtagaaactataggattacataagctagaattctcctcgtatcaaaataattagacattaaattaaatacatttttaatttaatttatatgaaaccggttgtatttataatattaataaaaatcataacccgccatggatgaatattagctgatgatgtgcattttgttgaccttgatgtttggtatagagtattataattccatcaaattacgattagtacttttttctatatttcttctacgtaatggatcaataaaatgatttcttttaattatttcatatttcgttgattgtttgttctttgaatctaaatttaattagatgagaatatgcacttaatgcctattagcatatgatctaatttgtatattattttctcatacatatatgacagtgataataatattaacaaaaaaaaagttaattaaaactttatttaggtctaaatatggaatgtagttactctaataagtgcaaatggaaattcagatggaatggattagcatgttgaaggcccatcaaattgggctgggctttgaattcaatggttgacaaaaatcggcccattgtaatagctaaaggaaaatactgatttgaaaaaataataatttaagagaaaattatctaaatatacaacttattttaccatattttctaaaattttctaccactcgaaaaaattacaaaatcctactctctcttattctcttatacatcattttacgcgatatattagtcggatatgtatcgggacattgaatgttgtacacgaaaccaagacacgatatatcagaacgtttttgaatgcatcggaattccaccaaatttaagagatttttgtaatatagaaaagagcaaggataaaatataactagctctaaacactatgagatttgtgtaaaatttctataatttaactaataattcattttggaaacacttatttgtgtcaaaactcaaaacttttgttaagaaaaaagtaatcaatctaaataatctctaaccaaccatctaataaatatataatatttcgtacaattcatattgtaatgagtattttaccatcaataatcaatatatacaagcaaagaaaagtaaatacgaacaacttgtttggacgatttttatctattgtattgtactgtactattttattagtttaaataccatgcttgttacctaaattacgtaatgtgttatttgaagtaacaatcgatttagtttgataacatatcatttttttttctcattttatcattacttattatttaataattctatttttatcttttactctacttttttatggttactccatccgtactccacttttcttgtaagtttattcttcatatcaattatgtgtgatatgatataacaatttaaaaggatacaattagttctaaaattatattcatcaaataaatattgtacgatgcaatacattatttcagatcataagtaataaatatcgaaacaaagcgtaactaattccactaccaatgaaagataagtaggtaagcacgtggattgtaccgatcagattcaattgagtgacgattactccatctcttaagaaagaacctatcatttgttcaatttggtcgatttgatacttagttaattcttttatccttatctttccactaatacctaatcgataacgaacctgaatggcttttttagggccaattccatcaattttagttgaggcaattcttacttgttcatcgccaactaattgaacgtggggaaaaataattggactgatgtgtcacatacgaaacattaaggaccaaagtgtacagacagaagactttccctcttaaacccaaaatcctccattaatggagacatttcaagattctttgagagagaaatcgaagaagagtggcataaggaagttgaagaatccaaaagttaaagcaaaaagatgaagaatttaccggtgtttttgatgggttgtggaggtgttggccgtcaattgcttcaacacattgtttcttgtcgatctcttcacgctaaacaggtaatgaaaagtgttgtctttttatcaatttgagacactcatcgtcaattttgattgttattagtgtttatttttgttgggtttttgtgggtaatactaaaaacttacaggggttgcatttgcgagttgtgggtgtgtgtgatagcaaatctttggtggttgtagctgatgttctttctgcagaattggatgatttatttcttcttgaagtttgtcgtgtcaaatccaatggctcttcattgcagactcttgcaaattctggtagcagttcatcctttttatggttttgttgttgaagtcatttggtgtgcttatttgtagaatgacaaaaaggtgaattcttttttttggttccaacatgtaggtgtatgtcaagtgttttctggtccagaagttatacgaaaagtaattgatattggacttcttggaaaatcaaaaggtttgtgtcatgtccaagatatttattttgggattgttgtggttggtaggcttgttaaggaaagcgtatacctgcttatagtgtcgtctattcttttctggtggaggactaatctacttgagaagttcgattagtaacaatgagtagctgttaactttatgctgtatgggttaaatgctatgtacattagctcctactattaaatattccccatgacttttaaatgctttgacgagtatagtatagtagttgacttcagctgctgcatgattctggaccttgcttatttactttgaccgtttagtccaatctaggctcaaatgtatgaagtgcagtgggtaaattagctttgtttttgcagtccggcagagttgttagtctattttgctgtatggaaggaattcttttgtttatcgggagggaatgagttcgaaaaacatcttattcttgcttatacatttcttacacttacttaaattctttgtacgtgaaggcataagataatgcaggtatcaaggtgttagcttttggggagttgtttcacagtcagattccttttgattgaaattcaaactgtggcaggtttagcatttgttgattgttcagctagtgctgagactattggagtgctaaaccaggttgtagattttggttgttgtgtggtgctggctaacaagaagcctcttactgtgccaatggtaaccgatcctttttattgtcgttaatttctttgaatgtgtagcttaaaaccaggtagttgttgtagcataggaacagcgttctagacatggttcaaccattcaatatgccactagcagtagaagagtaaaatgtagcagacagtgtccatggttttcattttcttttcttttttcttttagcaaccatatgtatgcttacgtgcagaaatgcagttaatgatccattcaaccgtgtttaatcttgaaaactaacaaaagatgctaaacgagacaagaacaaaaagccagtcaaatgctataacatgaatataaagtttgctgaaaatatatttaagtgaacacgtgtgatctatctaatagtttgaacttccgcatttaaaaaaatctaatagtttaaacttttgaatgaggtgactacctaattatttatggtagcagagaaggcagaggtttgggtttaggctcaccatcacccttcattagaatgataaaaaagttccacgtgcttggtcggttggaaaagaatcagttccacacgtgagcaagttaaataactaaaggtgcactcaacttaattttttggatgagatgatcacactattcaacagagctaaagtcaacgtcagtttcaattccttcccttgattgtctcttgcttacttattatgtttgctactgtcactgcataacttgtgaacattcagaattataggtcaatcacctttcaacccttgtcacctttcatcctcttaatctgtaaaagggtttcctctcaaatggcaactattatgtttagtgtattgattatttttgccttatttgcaggaggattatgataagttggtgtcacagccccgtcgccttagacacgagtcaactgtatgttctcttgtttctattgcgtgtaaaaatcttttatgcactgaaatgttggagacaaaggagattttagagtgtcatgttatggggttacactagtgtatgggtctctaggtagaaaaaaatgtattgtgtttgatcgagtaagaccagaaagctggctgaaaccttggttgtcctgtctctttgataccaacattttgcagtggtgaccagttccggtttgtagcttcttctcttgtcaatttaacacaagtatatccagtccctttatcaccaaggggtgtggtaggatggttggagcccctccatcctactctctcaactgtgaaagttccaattttcctgtgtcagatttcctcccactgttcgctgaaagaaggcgacatttgaagatagaaagattaactgatcacatggatagcgatgggtatcatttggtttatctgatatctagagcactggttgattaaaaattagcttcccttgtattagagattcttaaatgtctcatacatgttaaacctgcctcttctgctttaaaagcttttcttgtttgacttcccaaactatgatatgggatttgttgcgcattgtgtttgtttaagtgattaatttagcttctgtggtatacgaacgatagtattgtcctagttcagtttatactcggcttagcaaagttgtctgaaattgctatatgtgtggtaggttggtgctggccttcctgtcattgcatccttaaatcgcataatttcatcaggagaccctgtctaccgtattattgggagtttgagtggtaatattttatgaccatttatcatttaggctatatgcaatagcaaatgattatccttagtggttatcttgcttgttataaacattaagagcatttgatggtaagctgctatatatctcggtatctaacaggtaccctggggtatgtaatgagtgaggttgaggatggaaagccattcagccaagtcgttaatgctgctaaaagccttggctacactgaaccaggtgataagttacagccaccctactaatgttgtaaaatcaccatatgagttttgaagatatgacttacaaaaacagaaaagtggttgttgaaagtatgatattatctattcttaagtaagtgtagtcttactttattgtttatatgttcctctgtccgagtaattctactcgttttcctgtaaggcaagtgttcctcttgtacatcaatattttctggccttttgcttaggaagtttgtctagcactagttcgaatgtaagagaaatcagagaaatttgagaagagattaagagaatgtgtgatacaaatgtcttacacgtgaattcatcttttatacgctcactttacagtgcatattcttacatttacctaatgtggtgaacatgcacatataactctattttacacttatctcttgttatttacatttagctatctgattctcccctctagcaggtgcatacatgtaaacctgtataggatttggtgattatgtatataagctgatcagttgactttccaaactttataacagtgtcgtgaaaacaatttttttgggaagggacagtcggtttctatatgcttggtcctcttgtcagatgctgcatacaatgggatacaagtataatgcactcaagttttgttatgatcaatttcaattgttatagaaaaatctatgtcgggtttaactacgcctaaaagttaccccatgacacgaggattgccgaagaccacataaagagattacaacaatacatcctcaactgaagtgagactaacatcttattgcttgcacagggcggaacatatggagtatgtataaaataacttacggggctaaacattgggtaactaaacattagggatgagcttgagtagatatcattaagtaaatggactttgtgcctaacccagtccaaaaagctaatccaagatcatataagggtacctttaaccaatgtggcaaactaacagcaaccgttttcgatccttttggtggttgttaatctatgtgctcatcgttaccattgtcatgacccaatattttctttcttctatatagcccaattgcctgaaagtattatagtatttagaagtagaatgtatataaagaaggtatcactgtccattctgcatcgtgattgtctttgatttttgatgataatcctttccaagagcaggcttcctacccaacttctgattaaacttacagtgtccaagatttcaatccatttatattgcctaactattatgctgataaagcattatctttcttttttatctgaacttacctgcagtcttacagtatgcataattaagacataatgtttcatctgctatatactcacactcactgtaaaaagtgttttctggaagtatattttttctgtgatattcttatgctgaatgttgtccatttatgagtatgggaattttagcttaatgggtgtctttgttataattttaccttatttggtgcttgggatgatagtgcctttggggagaagaaaagcagtgatttaggcagaatcaagtttatgcatatgtttggtctaatgttgaaaaggaaaaatgtcgaatgatgtgggtattttctttttttaagaatacaaagtcacgataaagggagaaaattttgatggtattaattttgatatggataaccgttgagaattttgtctgaggtattagtttctattttgtacttgggatgatgatgtctttgggagtagaaaagttgtgatctatgcagaatcattttcgctgattgtgatggggaagcatatcttatccaacttgatatagttaaatcttggtttcttggtacctttcgtgaaacattcatagttcattttggttctgtaaattttgagaagttgaacatccctcataacaggctctaattcttactcggatccttggacgacgtttaaacctagataatatgaaggttaggatacatgtcaccatgtctctttgtttttttactaattcaattaacttcagaaaccttgatgcatttgcaattccctttccagattgaaagtttgtatcctgaagaaatgggaccagatgtgatgcctctggaagactttctagtgaatggccttcccttacttgatcagaaaattgaagataggattaaacaagcttctgcaaatgggaatgttctgcgctatgtttgcttgattgatgatgcgaggtaattctttcatttcatttttagtttgctcaatggataatggcaactggatcttttattcttatcacgttctgcaagtcaccatacctctagacgcttaaagcaaagcttgctcactgatgggagtgttatggcaagttaaggtactgatgagtgatgagcataacaattactactaattaagacaagtttatcttagaagatagtctcaattcctcttaacaaatgctttagaaaattatgacagcagtcacccacttggacatataagtttgagagctatctgcaaacctgttgtaagttcatctgttttatgttagtcatctgatcagctgttcacctcttgtatccgtaaccaattaaagaatgagtcagaagtataaatttgtaatggcatagatggggaaaaattgattattgaaaacacttttgtgtacatgacattaacatctcacattttcagatgtgaagttggcatccaagaagttccaaaagattctgcattgggaaggttaagaggaagtgataatgtggtatgcattgttcactttcacctcccattttgctatttctttggtccctcttcttcttgttccattactttgttttccgttgggaattttcttgtaactgctatggaggttcaaccatatcatacgcgtcgcaatgtttaaagcccttttgtgatgtcatttagtgtagtgatgtattacttcatgctgtgatttaaagaattgctcatcttttacccatgcctaggctgacgccttactttgtctttactctttacgcatcatctggtgtcgccctgcaaaactttatgtagttaaggtctttgattctactttaatcgtaaaatgtttcccttgtacagttgtaattatgaggtcataaaaacagtaagattaatgatgattgagcgtctgcaattcgtttgtctgcaggtggagatatacagccgttgttacgagaaacaacctttggttatccaaggtgctggagcaggaaatgataccacagcagctggtgtcctagctgatatccttgacattcaagatttattcccttgacagagtattatacactgagatacaaacattcgatcctcaaaggacaaaaaatcgactcttcttgtccctctgcttccagattggagattgaattcaggctaagaaagctcacgcattttttgaaaaatttctcgatacacgagatgcctcgtcagcttacagtagattattacacaatttctctcgtacataaccgtctcaaatggaacagttcaaactgagtcatttgcctcagtgctggactagtttttaggatttttcttcagcttataatcagtttccttgtaatgaccattttctttataatctgaaaaactgctgatatttctttataatatttcttcagaaaaccttatgattgaacaccacaatattcaccttttcggtatttaatgttcctttatgttatgtgttcttctatttttcccttttttttttaaagttaatcgtcaattgggacatggacccagataaaaaccataatgacattaatatctctcaattgttgagataaaattatgaaaagagaaaaatcaattattaacctattcctatgactattatttgcatcttatgagaagagaaaagactttgaaatatgacgttggccttttcctttcttcgactgtcaactatacaaaaacaaggaattcagttctattaaattcaagattcaaaaatgatttcttttttattttggagccccgcccccccccccccctcccccctcttgcttcaattattgaattgcaaaagtaatgaatagtcatgaaaccaggctggcagactccataatgtttttgctactcttcttttttttctatggctgtgagccgtacactgtagataagacatagttgtaccacttacaagtaagaccactagcaaaagaaagagagaaatcattcttgatcacatatcactcttagctcttagcattcaacaggtaaataaagttgttagtaattgaagattgaaacatttatcttcttaaaatcattttgtgttctccttgttttgatttgcagatttcagtaatggagattggcttagcagttggtggtgcatttctctcttcagctttgaatgttctctttgataggcttgctcctcacggtgatctgctcaacatgtttcagaagcataaggatcatgttaagctcttaaagaagctggaggacattttgctcggtcttcagattgtgctaagtgatgcagagaataaacaagcatcaaatcgacatgtgagccagtggttcaataagcttcagaatgctgtggacggtgctgagaacttgatagaacaagtcaattatgaagctttgaggcttaaggtggaaggccagcatcaaaatcttgcagaaacaagcaaccagcaagtaagtgaccttaacctgtgcttcagtgatgatttctttcttaacataaaggataagttggaagaaaccattgaaacattggaggtgttggaaaagcaaattggtcgccttggcttaaaggaacattttggttcgactaaacaagaaactagaacaccttcaacttctttagttgatgactctgatatctttggaaggcagaatgatatagaggatttgattgaccgtttattatctgaagatgcaagtggaaaaaagcggactgtagttcctattgttggaatgggtggtctgggtaagacaacacttgctaaagcggtttacaatgatgagagagtgcagatacattttggtttgaaagcttggttttgtgtttctgaggcatttgatgctttcagaataacaaaagggttacttcaagaaattggctcatttgacttgaaggctgatgacaatcttaatcagctacaagtcaaattgaaggaaagattaaagggaaagaagtttcttatagttttggatgatgtgtggaatgacaactacaacaagtgggatgaattgagaaatgtttttgtacaaggagatataggaagtaagatcattgtgacgacacgtaaagagagtgttgccttgatgatgggaaatgagcaaattagcatggacaatttgtctactgaatcctcttggtctttatttaaaacacatgcatttgaaaacatgggtcctatgggacatccggaacttgaagaggtcgggaaacaaattgcagctaagtgcaaaggactgcccttagctctgaagacgctcgctggcatgttacgctccaaatcagaggttgaagagtggaaacgtattttgagaagtgaaatatgggagctgccacacaatgacatattaccagcgttgatgttgagctacaatgatcttcccgcacatttaaagcgatgtttttccttttgtgcaatatttcctaaagattatccctttaggaaagaacaagttattcatctgtggattgccaatggtctcgtaccacaggaagatgtaataattgaagattcaggcaaccaatactttctcgagttgaggtcaagatcattattcgaaagggtcccaaatccttctcaagggaacacagagaatttattcttaatgcatgaccttgtcaatgatttagcgcaaattgcatcttcaaaactttgtatcaggttggaagagagccaaggatctcatatgttggaacaaagtcaacacttatcatattcaatgggatatggtggtgagtttgagaaattgacacccctctacaaattggagcagctgaggacattgcttccgacatgtattgatctccctgattgttgtcaccatctaagcaagagggtgctacataacatactgccaagactaacatccttaagggcattatcgttgtcatgctatgagattgttgagttgccaaatgacttgtttatcaaattaaagctcctcagatttttggatatttctcggacagagattaaaaggttgccagattccatttgtgcattgtataacttagagacacttctcctgtcatcttgttatgatcttgaggagctaccgctgcagatggagaagctgattaacttgcgtcatcttgacataagcaacactcgtctcttgaagatgccgctacatctgagcaagttgaaaagcctccaagtgttagtgggagccaaatttcttataggtggtttgagaatggaagatttgggtgaagtacataacttgtacggatctctatcagttgtagagttgcaaaatgtggttgatagaagggaagctgtgaaggcaaagatgagggagaagaatcacgtcgacaggttatatttggagtggagtggaagtagtagtgccgacaattcacaaacagaaagagacatacttgatgagctacgcccccataaaaacataaaagtagtcaaaatcactggatatagagggacaaactttcccaattggctagctgatcctttgtttcttaagctggtaaaattgtctcttagaaactgcaagaactgttattcattgccagcactaggacaactcccttttctgaaattcctttcgattagagagatgcatggaataacagaggtgacggaagaattctatggcagttggtcctccaaaaagccttttaactgtcttgagaagcttgaatttaaagatatgccggagtggaagcaatgggacctactaggaagtggagagttccctatacttgagaagcttttgattgaaaattgccctgaactcagtttggagacggtacccatccaactttcaagtttaaaaagttttgacgtaattggttctcccttggttataaactttcctttaagcatactgcccactaccttgaagagaataaagatatctgattgccagaaattgaaattggaacagccaactggtgagattagtatgtttctggaggaattgacactgattaaatgtgattgtatagatgatatatcacctgagttactcccaagagcacgcaaattgtgggtacaggattggcacaaccttactaggtttttgattcctactgccactgaaactctcgatatttggaattgtgagaatgttgaaatactttcggtggcatgtggggggacccagatgacgtcactgactattgcctactgtaagaagctgaagtggctgccagaacgtatgcaggaactccttccatctcttaaggaactgcatctgtctaattgtccagaaatagagtcctttcctgaaggtggattgcccttcaatttacaacaacttgcgatcagatattgcaagaaactggtgaacggccgaaaggagtggcatttacagagacgactctgtctcacagcgttaatcatctaccatgatggcagtgacgaagagattgttggtggtgagaattgggagttgccttcctctattcaaaggcttaccatagtgaatctgaaaacattaagcagccaacatctcaaaaacctcacctctcttcaatatctatttattaggggtaatttacctcagattcagccaatgctggaacaaggccagtgttcgcacctcacttcgcttcaaagtctacaaatctcctccctccaatcacttcctgaatcggcactgccctcctccctctctcacctggagatctcccattgccctaatctccaatcacttcctgaatcggcactgccctcctccctctctcagctgaccatcaataattgccctaatctccaatcactttccgaatcaacactgccctcctccctctctcagctggagatctccttttgccctaatctccaatatcttccactaaaagggatgccctcttccctctctgaactatctatttacaaatgcccattgctcaaaccacaactagaatttgacaagggggaatactggccaaatattgctcaatttcccaccataaagatcgatagggaatgcatgtgatgattaaaacgaatggctcttcaacttatgtaagctattcttttcccttggaagctttttatttccgtttacttcactttgcttttttgttaattcttttcatttttaatcgctaattctaaaaacatgccttgcacgtttatcccaaaatatttcatataatttttgtatagcaaatgacatattttatccccttcaaatctattggtatttactaaaaaaatatccatcatttttacgattgaaagtacatatattttcctaataaaaagaatacacccttaattataaaattgattaaaagtgcataaagtaaaaataactaattgttgtacaaatacaatattcaaatgaggatactaaaataccacatgttaggttaatgtatacaaaacaactaaccaatgtaaattctcaatattaataaccataaaacaataaaaagttatacaataacaacaaacaagaaacataaacattaaaaaaaataaaaataaaaagagtcaagaaaagagagcatagagattctctttttttttcaatttgttttaactgtgtacaatattgtgtcaaatgtcactattcatagaataagattgaagaacacttaagagttgttatgaatataacattaatccatttgatcatggatgagaggtggtagtaaaaatcataatgaatataattagtgggagttgcatatatttacataatgaagagttagtggtaataaatctatgtaatatacttcacattaatacaaatatttatatacaaaaaagaatataatatagatctatatgatttttttccctttttgttaagggcaaacataaccattcatatttccaattggaagatgaacaaaacaaaaaattcatgaatttaactccagcatgaaattaataaaaagaatacatattcaagaaactttatggtggttgattcatgtactaatatgatgatttactattaaatatttaatttattaaatagtttataacatttaaatttaatgtagaaatagaatcataatctaacttttgcctaacattctccccacttttagtcaattttcctttttgcattataatatggattgcacacaacaacttctatttaaaaaaggaaagacaaaattagaaaaaatagtatcaataaattggaatgaaaaatgtaaaattgtaataagaggaagagaagaaaaaatcagtagaatatatttacctaaccatgaataaggaagtatgttgagtaaaagaagagtaatgcaaaagtgtgagctgatatatggaggaaattgactaatataataatctgtattgaataatgaaaagaccaatctttaatttctgccaaatttttattacgagctcaagataatataaatttattaatttaataatgacataaataaataacatacattgtatgtatgtgtagttaatggggtagtgaaaaagactctttctaaaattatttttctctttaaagtatttttaaacttataatattagtgctatagaaaatgctatagaaaatcataagctactgcaagtttttatagtaattattttattaaattatatacctattatttataatcattccggaaatatataaacaattttggaaagcttgtaaaatgagaaattattatttcttatcgttattttagctattattaacatttagtatgacaacatttaaaaagtagcctcctttaaatattaacggtttctaaattaacgtagccaataatttgaaatgttttgacgttttgtttatctaaacacgcagaattttgtttttgaacttgaaacatgtaattttgccttgggtgaattataattttatttttactatttaattaattaaatattttataacattttaatataatgaactggtaaaatggtaatccaactttaaaggttggagcttcccacttttagtaatatatgatatatgatatatgatatatgatgatatatgatgttgttgtgctcatcatcaaacacatagctttatatttttgcttcatagagaatctaaattttttaaaagataatcagggataacgatcacaagttttaggaaataagtgcaacttccattgtcagaataagtagacgttatataattctatatttcttggatagcgaccagacaactacacagggcaatgcttgatgtaagagcttcagatatacatttgtagggtgtttatccaacgagtaataaaatcacagtcttctgatatcttctcttgcatatacttttgcaattttaaactttattttgaattgtgttgttgctaacttgaacatgttctgtgcttaatcagatgtggattttgaagggctagtacgacaagtctggtccatccattgtccacaagaagtgcttataaggtgttgctgctattttttacatatgttcatgagttcttttttatttttttgttctttccgctaaagttattatgtcatccacagtgaactcaggtctgctgttataggcaagtcttcgagatggggcaataccgctgatactatttcatgtttccagtgcaagcctcttttgtaagtagacaaactcgatttgtaaatatgtttgggactcaactagtggttagagtactgattttgtaagatttgtgtacgaaaaatcaaattagaaagataacttgcgatgattgaataagctcaaagaagtggatgtgaatttcaaatcgtgtcttttttttttcatgtgtgtgtgtgagaaatttgaagtgttgtttagatttgttggaatagtctaaatagattgtctctataaaatttgaagacatttgatggagatctgattagatgattttgaacaacaagtgcaactgaagatggatatgtatattattttcgtagttagcaacgtgttatatatttttatagtggatatattgttttctcattcagtgtttgatattcacattggagtccgactaaatttgaatttgcgcatttcaaggggcggcgttcttgacatgattttttccattctacggctcgtacgtgctcttaaattctaattaaggatagaaaaatctcaactatttcaccacaactcaaattagttatattgggtatacaagtgtaaactaagaaatataactatgtaggtgcaaatatttttgaaaaaccccaaataataagccaaaataaagaaagaatactaaatcgtacactcattactacaacaactaaaaaatatttataatcattgaactcctatgcacattctactgcaaaacataagtagaagaagttcaaattttggccatgaaatgacaccattttcttacactcaaaatgatcttaaatttcatgaatgaaacaatatacattactttggttgaagccccattttcttcctcattttcccaatgtataaatccttagacttgatcatcccggggactaatccaatgatcgttgtgaacaaaaattgagccactgcatcttctcttcctaatgaaacaatcatctgacccaagtttatgcatatgtttggtctaacgttgaaaaggaaaaacgtcgaatgatatggatatttttttttatgaatacaaattaaagtcgcgaaaaagattgaaaatttcgatggcattaattttgatatggatcaccgttgagaactttgcctgaggtataaatttctattttccctgtgttagaaatgtttcttgtagctccaaattgtgatgattcatttacacatttttaaaatttcatcttataacagctataaagtgtatccgagtcaattagctgttacagacttggctcttctttgtttaattcactttcttcaattcgatcagaaaatatttctctaaaggcatattattattttacatgatttctgtttgtgttactttttcgattatttctcctttgaactgtgaatgcatcttaacaataatttgattattgaatgcatcttaagtgtttataccgctaacgaagatattaaaacagttgaagagaaccccttgaatggtagaaaaataaagcaacatcagtgtatagtgtaattgatcaattatgtttcaggctacttgtggactcttcgagaaactaaaattagtatagattattaatattgatgctgctgatattaataatcacttggctattgttgaggatattacaaattttataatctcataaaggtttgctgaatatcatatgtctctgtttcgatgctatggggtaattactttaatgtgacaaataatagttttgtgactttactgtgtagtgtataaaattcatgttattttgatgatttggttgattcatgatgaacgtcgatcgtatgattacatgaactagatatccagtgtaatcttacaaatggggtctagggaagatatcaaggttgtttctgatagaccctcaattgtagtttctctattgcaacaaaactaaaaaaatcaccacccttcacatatgctcgaaggatgcagcctgtgattttttcgtattcagactaatactaatccaagtcatttcaagaataaaatgtgatcaattaacctactattgtcaggcaaggaaaaatcaaaggcgagatggaattaaaatggcacaccacatagagaaatagaactaactaatcgtaagtcaaaagaactcaataccactattctccaacaacgtgtagccaatctttctttcacactattattaatataaaaataatggctcagctaagtgataggaggtattgcttagtgtggagattagcatgctaatctcattttgtaaactggcttttacttttgctgggagaagattagtggaagcagtttgaaaagtcctgttgagaacaggtcgtggttttactcccttgagcaaggaggtttccacttaaagttgattgtcaatctttactttcaatatttgttctttactgtttattactgtaactgtcttgaggacctagtccaatctacataggtggacgcatacattccaacatggggctatcaaagaagggcgattaaaattattgtaccactgatactatttcatgtttccagtgcaagcctcttttgtaacttgacaaactcgatttgtaaatatgtgggactcaactagtggatagagtactcattttgtaagatttgtgtacggaaaatcaaattagaaagataactcgcgatgattgaataagctcaaataagtggatttgaattttaaatcgtgtctttttttttttatgtgtgtgtgtgaaaaatttgaagtgttgtttagatttgttggaatagtctaaagaaattgtgtaatgaccctcccggtcatttctgtatcttgccctcggtgtgtcgtttagagcgttcctgtagcgaccccaagtcatttatgacttgctgggactgacagttcagtcacctgttcgttcctttggttattgtgcgagttttagtgttttggagcttatgaaccttgaacgatcatttttgatcaaaagttcaagaagatgacatcggaatccaattctgatgattccatcagctccgtaagggtcattttaggctagtagcatggtcggcatgactcccgaggttttcagtgtgactcggtgtgattaggcgttttaacttttaagtttaagcctaagtttgactttagtcaacattctgagtaaacgcgctcggatgagaattccgtcagagcgttcagctctggaatgtcgagtttggtctagattgacctttcttttatgtttcgaggtttctgatatttttccgagcccttttgtggtttttgacttaaaatggcctttggaagtgggacccactttttatcgagatgacctctgatgaaaattttgactgcatcgttgagtctggaatgtcgaatttggaattgttgcatatctcttttgcgtgcacggggttccgaacgagttcggagtgcctcgttggagtttttttaagttcctgaaaatctggtgcaatttcagcttgttctaaaactttaaaagggcttaactctgtcatttctagtccaaattcaaggatcaaaaggttcatcttgtgggggttttcgtaaggaacgcgttggtgagctcggaaactgatttggggtccccgtttgaggtaaatcttgtaaaatacctgctgccgcgaccttttttgtgagcttggtttggaatttttgagacttgttttctcagtcattttaggtccgatttcaatgattcttgaggctatcttgagtggtttttcgaggagagtgttgtggtgttgtcagaattcactgtagacctcccgtttctggtaaatttactgattcagctgctgtcccatttctagttcaaccatgtcatacgcgttgtcaatgtttaaagcccttttgtgatgtcatttagtgtagtgatgtataacatcatgctgtgattttaaagaattgcttatcttttacccatgcctaggctgacgccttactttgcctttactctttacgcatcatctggtgtccccctgaaaatttttgtgtagttaaggtctttgattctaccttaatggtaaaatgtatcccttgtacttaggaggtcatgcaatcagtaagattaatgacttgcttttgtcgaataatgactatgatgattgaacgtctgcaatttgtttgtctgcaggtggagatatacagccgttgttatgagaaacaacctttggttatccaaggtgctggagcaggaaatgataccacagcagctggtgtcctagctgatatccttgacattcaagatttattcccttgattgagtattatacactgagatacaaacattagatcctcaaaggacgaaaaatccactcttcttgtccctctgcttccagattggagattgaaatcaggctaagaaagctcacgcattttttgaaaaatttctcgatacacgagagtgcctcgtcagtttacagtagatcattacgtaatttctctcgtgcataacatctcaaatggaacagttcaaactgagtcatttgcctcagtgctggactagtttttaggattttacttcagcttataatcagtttccttgtaatgaccattttctttataatctgaaaaacagctgatatttctttataatatttcttcagaaaaccttatgatagaacaccacaatattcaccttttcggtatttaatgttcctttatgttatgtgttcttcttttttttccctctttttttttttttttttttttaatttaaccatcatttgggacagggactttaatatctctcattttttgaaaaaaacttataaaaaaaaaaaaatcaaataggcaacttgacctattcttaggactattatttgcatcttatgaaaaaaaaaaaaaatttaaaatatgatgttggccttttcctttcttcaacggtcaactaaaaaaaaacaaggaattcatttctattaaattcaactttcaaaaatgatttctttttttttttgaagcccccccccctcacccccctcacccccccccccctcttgcttcaattattgaattgcaaaagtaatgaatagtcatgaaaccaggctggcagactccgtaatgtttttgctgctcttttttttttctatggctgtgagctgtagactgtagataagacatagttgtaccaattacaagtaagaccactagcaaaagaaagagagagaaatcattcttgatcacatatcactcttagctcttagcattcaacaggtaaaataaagttgttggtaattgaagattaaaacatttatcttcttaaaatcattttgtgttctccttgttttgatttgcagatttcagtaatggagattggcttagcagttggtggtgcatttctctcttcagctttgaatgttctctttgataggcttgctcctcacggtgatcttctcagcatgtttcggaaacataaggatcatgttcagctcttaaagaagctggaggacattttgcttggtcttcagattgtgctaagtgatgcagagaataaacaagcatcaaatcgacatgtgagccagtggttcaataagcttcagaatgctgtggacggtgctgagaacttgatagaacaagtcaattatgaagctttgaggcttaaggtggaaggccagcatcaaaatcttgcagaaacaagcaaccagcaagtaagtgaccttaacctgtgcttcagtgatgatttctttcgtaacataaaggataagttggaagaaaccattgaaacattggaggtgttggaaaagcaaattggtcgccttggcttaaaggaacattttggttcgactaaacaagaaactagaacaccttcaacttctttagttgatgattctgatatctttggtaggcagaatgatatagaggatttgattgaccgtttattatctgaagatgcaagtggaaaaaagcggactgtagttcctattgttggaatgggcggtctgggtaagacaacacttgctaaagcggtttacaatgacgagagagtgcagaaacattttggtttgaaagcttggttttgtgtttctgaggcatttgatgctttcagaataacaaaagggttacttcaagaaattggctcatttgacttgaaggctgatgacaatcttaatcagctacaagtcaaattgaaggaaagattaaagggaaagaagtttcttatagttttggatgatgtgtggaatgacaactacaataagtgggatgaattgagaaatgtttttgtacaaggagatatagaaagtaagatcattgtgacgacacgtaaagagagtgttgccttgatgatgggaaatgagcaaattagcatggacaatttgtctactgaagcctcttggtctttatttaaaacacatgcatttgaaaacatgggtcctatgggacatccggaacttgaagaggtcgggaaacaaattgcagctaagtgcaaaggactgcccttagctctgaagacgctcgctggcatgttacgctccaaatcagaggttgaagagtggaaacgtattttgagaagtgaaatatgggagctgccacacaatgacatattaccagcgttgatgttgagctacaatgatcttcccgcacatttaaagcgatgtttttccttttgtgcaatatttcctaaagattatccctttaggaaagaacaagttattcatctgtggattgccaatggtctcataccacaggaagatgaaataattgaagattcaggcaaccaatactttctcgagttgaggtcaagatcattatttgaaagggtcccaaatccttctgaagggaacacagagaatttattcttaatgcatgaccttgtcaatgatttagcccaagttgcatcttcaaaactttgtatcaggttggaagagagccaaggatatcatctgttggaaaagggtcggcacttatcatattcaatgggagaagatggtgagtttgagaaattgacgcccctctacaaattggagcggctgaggacattgcttccgatatgtattgatctcacggattgttatcaccctctaagcaagagggtacagctcaacatactgcctagactaagatccttgagggtactatcattgtctcattacaggattaaggatttgccggatgacttgtttatcaaattgaaactactacgatttttggatatttctcacacagagattaaaaggtttccagattccatttgtgcattgtataatttggagacacttctcctgtcatcttgtgctgatcttgaggagctaccgctgcagatggagaagttgattaacttgcgtcatcttgacataagcaacacttgtctcttgaagatgccgctacatctgagcaagttgaaaagcctccaagtgttagtgggagccaagtttcttgtaggtggtttgagaatggaagatttgggtgaagtacataacttgtacggatctctatcagttgtagagttgcaaaatgtggttgatagtagggaagctgtgaaggcaaagatgagggagaagaatcatgttgacaagttatcattggagtggagtgaaagtagtagtgccgacaattcacaaacagaaagagacatacttgatgagctacgcccacataaaaacataaaagaactccaaatcatcggatatagagggacaaattttccaaattggctagctgatcctttgtttcttaagctagtacagttgtctcttagaaactgcaagaactgttattccttgccagcactaggacaactcccttttctgaaactcctttcgattggagggatgcctggaataacagaggtgacggaagaattctatggcagttggtcctccaaaaagccttttaactgtcttgagaagcttgaatttaaagatatgccggagtggaagcaatgggaccaactaggaagtggagagttccctatacttgagaagcttttgattgaaaattgccctgaactcggtttggagacagtacctatccaactttcaagtttaaaaagttttgaagtaattggttctcccatggttggagttgttttttatgatgcccaacttgagggaatgaagcagattgaggaattacgtattagtgattgtaactctcttacctcctttccttttagcatactgcccactaccttgaagagaatagagatatctgattgccagaaattgaaattggaacagccagttggtgagatgagtatgtttctcgaggaattgacactggagaactgtgattgtatagatgatatttcacctgagttgctcccaagagcacgcacattgtttgtagaggattgccacaaccttactaggtttttgattcctactgccactgaaactctcttaattgggaattgtaagaatgttgaaaaactttcagtggcatgtggggggccccagatgacatcactgagtattgatggcagtttgaagctgaagtggctgccagaacgtatgcaggaactccttccatctcttaagtatctgcaactgagtaattgtccagaaatagagtcctttcccgaaggaggattgcccttcaatttacaacaacttcagatctgtaattgtgagaaactggtgaatggacgaaaggagtggcgtttacaaagactcctctgtctcacagatttattcattgaccatgatggcagtgacgaagagattgttggtggtgagaattgggagttgccttcctctactcaaacacttggcatatccaatctgaaaacattaagcagccaacatctcaaaagactcatctctcttcaaaatctatatattgagggtaatgtacctcaaattcagtccatgctggaacaaggccagttttcgcacctcacttcgcttcaaagtctacaaatcgagaatttccctaatctccaatcacttcctgaatcggcactgccctcctccctctctcagctgaggatctccctttgccctaatctccaatctcttccattaaaagggatgccctcttccctctctaaactatatattcgcgactgcccattgctcaaaccactactagaatttgacaagggggaatactggccaaatattgctccatttcccaccataaagatcaatggggaatgcatgtgatgattcaaacgaatggctcttcaactgatgtaagctattcttttcccttgaaagctttttatttccgtttacttcactttgcatttttgttaattcttttcatttttaatcactagttctggaaacatgctttgcacatttatcccaaaatatttcatataatttttgtatagcaaatgacatattttatccccttcaaatctattggtatttactaaaaaaatatccatcatttttatgattgaaagtacatatattttcctaataaaaagaatacacccttaattataaaattgattaaaagtgcataaagtaaaaataactaattgttgtacaaatacaatattcaaatgaggatactaaaataccacaagttaggtttaatgtatacaaaacaactaatcaatgtaaattctcaatattaataaccataaaacaataaaaagttatacaataacaacaaacaagaaacataaacattaaaaaaaaaacaaataaaaagagacaacagaagagagcatagagattctcttttttttttttccaatttgttttaactgtgtacaatattgtgtcaaatgtcactattcataggatacgattgaagaacacttagagttgttatgaatataacattaatccatttgatcgtggatgagaggtaaaaatcataatgaatataattagtgggagttgcatatatttacataatgaagagttagtggtaataaatctatgtaatatacttcacattaatacaaatatttatatacaaaaaagaatataatatagatctatatgagtttttttttgctttttgttaagggcaaacataaccattcatatttccaattggaagatgaacaaaacaaaaaattcatgaatttaactccagcatgaaattaataaaaagaatacatattcaagaaactttatggtggttgattcatgtactaatatgatgaattactattaaatatttaatttattaaatagtttataacatttaaatttaatgtagaaatagaatcataatctaacttttgcctaacattctgcccacatttagtcaattttcctttttgcattataatatggattgcacacaacaacttctattaaaaaaaggaaagacaaattttataagctcataaaggtttgctgaatatcatatgtttctgtttggatgctctggggtaattactttaatgtgacaaataatagttttgtgactttactaaattcatgttattttgatgatttggttgattcatgatgaacgtcgatcgtatgattacatgaactagatatccagtgtaatctcacaaatgggatctagggaagatatcaaggttgtttccgataaaccctcaattgtagtttctctattgcaacaaaactaaaaaaaatcaccacccttcacatatgctcgaaggatgcggcccgtgattttttcgtattaagactaatactaatccaagtcatttcaagaataaaaagtgatcaattaacctactattgtctggcaaggaaaaatcaaaggcgagatggaattaaaatggcccaccacatagagaaatagaactaactaatcataagtcaaaggaactcaataccactattctccaactacttgtagccaatctttctttcacactattattaatataaaaataatggtcaaaatcaaattcaattgttaactgcccttattgaaaatatagaattgactactgattcttaaggaacgcgtttccactaccttttgaaaccacaaaaaaatggacaaattcctttccttgtagacacatacataaaacgaggtgaaatatgttctgtttccaccagagttgtttagtatcatgaatgagccaaacttttatacagaatgacatagataagccatttttaataattaaatgacatatttgagtttttttccttatatcaaacacttatttactattttcaaaaaatacatatactaaaattgctattgtttgttctttctattctcaaactctgtaatatttaagaaaatgcttcttttttttttatgtcatttggcaaaatgtgatagtagtaactagtgtcatgatcccaactctcaaataggtcatgatcgacacaaggcgacttgacctatttttagaactactaatttcattttatgagaagagaaaataactttttaatagtaggttggggatactctcgaaagcataagtacatcagacatgcctttatttttaaaaatattctcttgcatatacttttgcaattttaaggtacattttgaactgtgttgttgctaaacatgttctgtgcttaatcagatgtggattttgaagggcgagtacgacaagtctggtccatccattgtccacaagaagtgcttctaaggtgcttctactatttttacatctgttcgcgagttcttttttatttattttttgttctttccactaaagctattaggtcatccacagtgaactcaggtctgttgttataggcaagtctttgagatggggctatcaaagaagggcgatcaaaaacattgtaccactgatactatttcatgtttccggtgcaagctgcttttgtaagttgacaaactcgatatgtaaatatgtttgggacttaactagtggttagagtactgattttgtaagatttgtgtacggaaaatcaaattagaaagatatctcgcgatgattgaataagctcgaagaagtggatttgaatttcaaatcgtatctttttatttttttatgtaagttagaaatttgaagtgttgtttagatttgttggatttgcctaaagagattttctctataaaatttgaagtcatttgatggagatctgattagatgattttgaatagaaattgcaactgaagatggctgtattattttcgtagttagcaacgtgttatatatttttatagtggatatatcattttctcattcgatgtttggtatccacattggagtccgactaaattcagatttgctcatttcaaggggcggcgctcctgagatgattttttaccattctatggctcatgctcctaaattctaaataagggtagaaaaatctcaactatttcaccacaactttttttttccaccacaactcatatgagttatattggatatacaagtgcaaatatttttgaaaaaacccaagtaactaaatcctacactcattaactacaacaactaaaaaatatttatagccctcaaatgtaagtagaagaactcaaattttggccatgaaatgacaccattttctcacactcagaatgatctaaaatttcatgaatgaaacaatacatattacttaggttgaagccccattttcttcctcgttttcccaacgtataaatcctttgacttgatcatcccggggactaatccaatgatcgttgtgaacgaaaattgagccgctgcatcttgccttcctaacgaagcgatgatcaaggctcgtatattgcaagtttgccttcttttcctctgctcatcaaaagtttcaagttcttcacggccactagagcatgtttttgagcagaatatccttgtttaagttcctggtaatgaagaaagcatcagaattcaattgaagaataataacaacaggaacatacacagtattgatgagaaagtagagtttacgcagaccttactcctatcttgtcaggtaagaatttaaatgaataacagaatcgaaaattcaagtactagctagctgcttcaagtcctctggctactgctatgttatcaaaaagattcaagatgccttttaaatcgactctacgctgaccttacctcttgcaataacatatgtagtgtaacctcacaaatagggtctagggagggtagtgtgtacgttgacctttcccctatcttggaagatagaaaggttgtttttgatagaccctcggttagagtttctccatttcaacaaactaaaaaaaatcaccacccttcacatatgctcaaaggatgcagcccatgatttttttcgtactcaaactgataacaatccaagtcatttcatgaataaaatgtgatcaattaaccaatcattgttaggccaatgaggctctcttctggctttacctacatggcaagggaaaaatcaaagggtagaactgactaatcctaaatcaaagggtcgagaaactcaatatatgctcaaacaacttggagcagggccttctttccgcactgttactaatatgaaaataatggtcaaaattggattcaattgtcaattgcccccattgataatacaggagtgactactaattcataaggaactagagttacatctcttttccattcaagagctcttacgcgttttcacgatcttttaagaccacgaaaaatggacaaatttcttttcttaggaacacattcaaggttcgtcactatagaaaggatacattttcaagaaataagagatatgcagtttagtgtttaccttaatatcagttatatctcgaacatcaaatatgtttctgtaacccttgattctaagatttttatcaaccttcaatgttccaaaattatcgattcgatccttcaaatacgtctcccttaaccactctgaacccggtggctttcccgtgaaagaaattggcaatctgctctgatagtttccccaaacgaggtgaaatatgttctgtttccacccgagttgtttgtgttatcactcaaatcgacagattgcatcaatttcacttccacattcttatttttcaaccattctaaagtcttgtcagacacttttggttcgatgaactctagtaatctggatccgtcgtgcaccaaagttaccttcttttgagggaaatcgacagcgatttctgcagcaatttcaacaccagtaggaccaccaccaacaatcaatatagaatcagctgcttttatcttttcattctctgcaacaacaagattaatgatgcaaaaattagtcaaacgttcacaacattttgactagtaatatcatcactagtacatctcaacactcacgacaagacaatcgactgaatcccatgaaaacttgctagaggaaccgctcaatgtatacaaaacacccatgctttagctttgttttatcattttccaaaaaggacaccaaaaacagtcgagcctcgcgccattttgactagtaatatcaagtagtaatctataacgttaacaggacggtcacaaaagaaaagattaatcactagtacatctcgtaagagagtagagcagtcaggatcaagacaattggctgaatcccgtgaaattaaacttgccagagaagctgatttagaaataaagaatctttgatcaacggatacaaaacacaaatgctttaacttctttttatcattttccaaaaagttgataaacttagcgagcataaacattccatgtgattgtacgtacaagtaatttgctcgttggaaagcagacaagatggtaaatccaacgaattaaacacatgaatgatatcttaaagaagtctttgatgctatgtatatatatatatatatatatacacctgtttgatattcttccaatctgtctgttctcgttacaggcaggggattgtagtgaccggtggctaccacaagatagtcataggtaacttgatgtccatctgcagtcaagacttctttgttggtgatattagtgacttcagacactatgagacgcccattggcgaggtaatctttgtggtggatcaatgatctctccgtgaatgaaggctctaccgttgctcttaagctcgcccatggtatctcgaaatagtccttcctgttaacaggttttgactaatcaagacacattgaaccaaattgaagtacaccacaatgattgatttctcacaagatcactcaactaatagtttttatctcagaaaatcatttttcttcgagattccaaatttcttcggcaaaagtgactttctgagatcgtaactatggagacctttttcccaatttgttctattttgaagaatccaagctt

SEQ ID NO: 38 - DNA, 28 bp, Artificial Sequence
  Primer R3a_BamHI_Fw_MES
ggaggatccatggagattggcttagcag

SEQ ID NO: 39 - DNA, 27 bp, Artificial Sequence
  Primer R3a_SpeI_Rev_MES
ggaactagttcacatgcattccctatc

SEQ ID NO: 40 - DNA, 709 bp, Solanum venturii
  misc_feature (0)...(0): Rpi-vnt1.1 promoter
agttatacaccctacattctactcgagtcattatgatgatgtctcacgaccaaatcaaatcaaagttaaataaatatcgaaccgaacgcccactctgtatgagtatggcaaaagattttgagagaatcaagttgcataaaagcctaattttcatggaacatacaaattgagtctcataatagcccaaactcacagccatgaacccaaattgggtaaagttttgcaagacgttcatcaaacagttaggaaacataaaatggcgctagatatataataaatttttttaacatatggtgtgattgatagttatatactaaagatgtttgcttagttacgtaattttttcaaaaaaaaaaggtacattatcaatcatcagtcacaaaatattaaaagttactgtttgttttttaaattccatgtcgaatttaattgaatgacacttaaattgggacgaacggtgtaatttcttttgactattctactagtatctatccacagcacgtgttgttcctttcttctttcgtttttcatttacttgacattattaggagacttggccctgaactccaactattctaagctgacctttcttttcctttaccaattatcttcttctttctaatttcgttttacgcgtagtactgcctgaattttctgactttcaacgtttgttattcatgcttgaaaacgaaataccagctaacaaaag

SEQ ID NO: 41 - DNA, 925 bp, Solanum venturii
  misc_feature (0)...(0): Rpi-vnt1.1 terminator
ataattatttacgtttaatatccatgatttttttaaatttgtatttagttcatcaactaaatattccatgtctaataaattgcagggatgcctttgaaaatgattctgtgttggagagaatcttctgatgcctgttggtattataatactaataataagagaaaaagtttgattactgtttcaagttaattgcttgtgatttgtaaaaacaaattacttttatatttctctttgttttattttatgtttatttatctttaattaatggagtaataaaataaaaatcttattttcaatagaaaaaagtagaccttatttgtggtgcatgtatggtatctttttgaaatttttgatatatttgctctttgattcgaatttcttgcttatatgatgatttgcataaatataaaatattatacaaatacctatgggttggaaaatatagaaatatgccaatcaaatgtatacaaaaatcattaatagatagaatcgtaaaagatatacaaatgagaaatgcttgactaagaagcttcgtgcaacctctcacactgagcacaatgcatttggtgatctcggcactattgctgttacttgtaagactacgttccccaataagtctttccaaacggcttgcaaagctgagaatatgaaaatctcataggttagtttgctgcgttaattatttacatttaatatgctcgataaggtgattttaaaaaaatttgtactagttaattcatgaactaaatatttcatttaatactccataattctgaatatggaaaataaataatatttaataacaagaataaaatgataaattattcattgattttataaattggataaatattattaaatattcttaaataatataatgaacaagtgaagatgaacggagggagtatgaagcctcttttcaaag

SEQ ID NO: 42 - DNA, 3849 bp, Artificial Sequence
  mutant R3a
  allele (0)...(0): GS4
  CDS (1)...(3849)
atggagattggcttagcagttggtggtgcatttctctcttcagctttgaatgttctctttgataggcttgctcctcacggtgatctgctcaacatgtttcagaagcataaggatcatgttaagctcttaaagaagctggaggacattttgctcggtcttcagattgtgctaagtgatgcagagaataaacaagcatcaaatcgacatgtgagccagtggttcaataagcttcagaatgctgtggacggtgctgagaacttgatagaacaagtcaattatgaagctttgaggcttaaggtggaaggccagcatcaaaatcttgcagaaacaagcaaccagcaagtaagtgaccttaacctgtgcttcagtgatgatttctttcttaacataaaggataagttggaagaaaccattgaaacattggaggtgttggaaaagcaaattggtcgccttggcttaaaggaacattttggttcgactaaacaagaaactagaacaccttcaacttctttagttgatgactctgatatctttggaaggcagaatgatatagaggatttgattgaccgtttattatctgaagatgcaagtggaaaaaagcggactgtagttcctattgttggaatgggtggtctgggtaagacaacacttgctaaagcggtttacaatgatgagagagtgcagatacattttggtttgaaagcttggttttgtgtttctgaggcatttgatgctttcagaataacaaaagggttacttcaagaaattggctcatttgacttgaaggctgatgacaatcttaatcagctacaagtcaaattgaaggaaagattaaagggaaagaagtttcttatagttttggatgatgtgtggaatgacaactacaacaagtgggatgaattgagaaatgtttttgtacaaggagatataggaagtaagatcattgtgacgacacgtaaagagagtgttgccttgatgatgggaaatgagcaaattagcatggacaatttgtctactgaatcctcttggtctttatttaaaacacatgcatttgaaaacatgggtcctatgggacatccggaacttgaagaggtcgggaaacaaattgcagctaagtgcaaaggactgcccttagctctgaagacgctcgctggcatgttacgctccaaatcagaggttgaagagtggaaacgtattttgagaagtgaaatatgggagctgccacacaatgacatattaccagcgttgatgttgagctacaatgatcttcccgcacatttaaagcgatgtttttccttttgtgcaatatttcctaaagattatccctttaggaaagaacaagttattcatctgtggattgccaatggtctcgtaccacaggaagatgtaataattgaagattcaggcaaccaatactttctcgagttgaggtcaagatcattattcgaaagggtcccaaatccttctcaagggaacacagagaatttattcttaatgcatgaccttgtcaatgatttagcgcaaattgcatcttcaaaactttgtatcaggttggaagagagccaaggatctcatatgttggaacaaagtcaacacttatcatattcaatgggatatggtggtgagtttgagaaattgacacccctctacaaattggagcagctgaggacattgcttccgacatgtattgatctccctgattgttgtcaccatctaagcaagagggtgctacataacatactgccaagactaacatccttaagggcattatcgttgtcatgctatgagattgttgagttgccaaatgacttgtttatcaaattaaagctcctcagatttttggatatttctcggacagagattaaaaggttgccagattccatttgtgcattgtataacttagagacacttctcctgtcatcttgttatgatcttgaggagctaccgctgcagatggagaagctgattaacttgcgtcatcttgacataagcaacactcgtcccttgaagatgccgctacatctgagcaagttgaaaagcctccaagtgttagtgggagccaaatttcttataggtggtttgagaatggaagatttgggtgaagtacataacttgtacggatctctatcagttgtagagttgcaaaatgtggttgatagaagggaagctgtgaaggcaaagatgagggagaagaatcacgtcgacaggttatatttggagtggagtggaagtagtagtgccgacaattcacaaacagaaagagacatacttgatgagctacgcccccataaaaacataaaagtagtcaaaatcactggatatagagggacaaactttcccaattggctagctgatcctttgtttcttaagctggtaaaattgtctcttagaaactgcaagaactgttattcattgccagcactaggacaactcccttttctgaaattcctttcgattagagagatgcatggaataacagaggtgacggaagaattctatggcagttggtcctccaaaaagccttttaactgtcttgagaagcttgaatttaaagatatgccggagtggaagcaatgggacctactaggaagtggagagttccctatacttgagaagcttttgattgaaaattgccctgaactcagtttggagacggtacccatccaactttcaagtttaaaaagttttgacgtaattggttctcccttggttataaactttcctttaagcatactgcccactaccttgaagagaataaagatatctgattgccagaaattgaaattggaacagccaactggtgagattagtatgtttctggaggaattgacactgattaaatgtgattgtatagatgatatatcacctgagttactcccaagagcacgcaaattgtgggtacaggattggcacaaccttactaggtttttgattcctactgccactgaaactctcgatatttggaattgtgagaatgttgaaatactttcggtggcatgtggggggacccagatgacgtcactgactattgcctactgtaagaagctgaagtggctgccagaacgtatgcaggaactccttccatctcttaaggaactgcatctgtctaattgtccagaaatagagtcctttcctgaaggtggattgcccttcaatttacaacaacttgcgatcagatattgcaagaaactggtgaacggccgaaaggagtggcatttacagagacgactctgtctcacagcgttaatcatctaccatgatggcagtgacgaagagattgttggtggtgagaattgggagttgccttcctctattcaaaggcttaccatagtgaatctgaaaacattaagcagccaacatctcaaaaacctcacctctcttcaatatctatttattaggggtaatttacctcagattcagccaatgctggaacaaggccagtgttcgcacctcacttcgcttcaaagtctacaaatctcctccctccaatcacttcctgaatcggcactgccctcctccctctctcacctggagatctcccattgccctaatctccaatcacttcctgaatcggcactgccctcctccctctctcagctgaccatcaataattgccctaatctccaatcactttccgaatcaacactgccctcctccctctctcagctggagatctccttttgccctaatctccaatatcttccactaaaagggatgccctcttccctctctgaactatctatttacaaatgcccattgctcaaaccacaactagaatttgacaagggggaatactggccaaatattgctcaatttcccaccataaagatcgatagggaatgcatgtga

SEQ ID NO: 43 - protein, 1282 aa, Artificial Sequence
  protein encoded by mutant R3a
MEIGLAVGGAFLSSALNVLFDRLAPHGDLLNMFQKHKDHVKLLKKLEDILLGLQIVLSDAENKQASNRHVSQWFNKLQNAVDGAENLIEQVNYEALRLKVEGQHQNLAETSNQQVSDLNLCFSDDFFLNIKDKLEETIETLEVLEKQIGRLGLKEHFGSTKQETRTPSTSLVDDSDIFGRQNDIEDLIDRLLSEDASGKKRTVVPIVGMGGLGKTTLAKAVYNDERVQIHFGLKAWFCVSEAFDAFRITKGLLQEIGSFDLKADDNLNQLQVKLKERLKGKKFLIVLDDVWNDNYNKWDELRNVFVQGDIGSKIIVTTRKESVALMMGNEQISMDNLSTESSWSLFKTHAFENMGPMGHPELEEVGKQIAAKCKGLPLALKTLAGMLRSKSEVEEWKRILRSEIWELPHNDILPALMLSYNDLPAHLKRCFSFCAIFPKDYPFRKEQVIHLWIANGLVPQEDVIIEDSGNQYFLELRSRSLFERVPNPSQGNTENLFLMHDLVNDLAQIASSKLCIRLEESQGSHMLEQSQHLSYSMGYGGEFEKLTPLYKLEQLRTLLPTCIDLPDCCHHLSKRVLHNILPRLTSLRALSLSCYEIVELPNDLFIKLKLLRFLDISRTEIKRLPDSICALYNLETLLLSSCYDLEELPLQMEKLINLRHLDISNTRPLKMPLHLSKLKSLQVLVGAKFLIGGLRMEDLGEVHNLYGSLSVVELQNVVDRREAVKAKMREKNHVDRLYLEWSGSSSADNSQTERDILDELRPHKNIKVVKITGYRGTNFPNWLADPLFLKLVKLSLRNCKNCYSLPALGQLPFLKFLSIREMHGITEVTEEFYGSWSSKKPFNCLEKLEFKDMPEWKQWDLLGSGEFPILEKLLIENCPELSLETVPIQLSSLKSFDVIGSPLVINFPLSILPTTLKRIKISDCQKLKLEQPTGEISMFLEELTLIKCDCIDDISPELLPRARKLWVQDWHNLTRFLIPTATETLDIWNCENVEILSVACGGTQMTSLTIAYCKKLKWLPERMQELLPSLKELHLSNCPEIESFPEGGLPFNLQQLAIRYCKKLVNGRKEWHLQRRLCLTALIIYHDGSDEEIVGGENWELPSSIQRLTIVNLKTLSSQHLKNLTSLQYLFIRGNLPQIQPMLEQGQCSHLTSLQSLQISSLQSLPESALPSSLSHLEISHCPNLQSLPESALPSSLSQLTINNCPNLQSLSESTLPSSLSQLEISFCPNLQYLPLKGMPSSLSELSIYKCPLLKPQLEFDKGEYWPNIAQFPTIKIDRECM

SEQ ID NO: 44 - DNA, 3849 bp, Artificial Sequence
  mutant R3a
  allele (0)...(0): GS8
  CDS (1)...(3849)
atggagattggcttagcagttggtggtgcatttctctcttcagctttgaatgttctctttgataggcttgctcctcacggtgatctgctcaacatgtttcagaagcataaggatcatgttaagctcttaaagaagctggaggacattttgctcggtcttcagattgtgctaagtgatgcagagaataaacaagcatcaaatcgacatgtgagccagtggttcaataagcttcagaatgctgtggacggtgctgagaacttgatagaacaagtcaattatgaagctttgaggcttaaggtggaaggccagcatcaaaatcttgcagaaacaagcaaccagcaagtaagtgaccttaacctgtgcttcagtgatgatttctttcttaacataaaggataagttggaagaaaccattgaaacattggaggtgttggaaaagcaaattggtcgccttggcttaaaggaacattttggttcgactaaacaagaaactagaacaccttcaacttctttagttgatgactctgatatctttggaaggcagaatgatatagaggatttgattgaccgtttattatctgaagatgcaagtggaaaaaagcggactgtagttcctattgttggaatgggtggtctgggtaagacaacacttgctaaagcggtttacaatgatgagagagtgcagatacattttggtttgaaagcttggttttgtgtttctgaggcatttgatgctttcagaataacaaaagggttacttcaagaaattggctcatttgacttgaaggctgatgacaatcttaatcagctacaagtcaaattgaaggaaagattaaagggaaagaagtttcttatagttttggatgatgtgtggaatgacaactacaacaagtgggatgaattgagaaatgtttttgtacaaggagatataggaagtaagatcattgtgacgacacgtaaagagagtgttgccttgatgatgggaaatgagcaaattagcatggacaatttgtctactgaatcctcttggtctttatttaaaacacatgcatttgaaaacatgggtcctatgggacatccggaacttgaagaggtcgggaaacaaattgcagctaagtgcaaaggactgcccttagctctgaagacgctcgctggcatgttacgctccaaatcagaggttgaagagtggaaacgtattttgagaagtgaaatatgggagctgccacacaatgacatattaccagcgttgatgttgagctacaatgatcttcccgcacatttaaagcgatgtttttccttttgtgcaatatttcctaaagattatccctttaggaaagaacaagttattcatctgtggattgccaatggtctcgtaccacaggaagatgtaataattgaagattcaggcaaccaatactttctcgagttgaggtcaagatcattattcgaaagggtcccaaatccttctcaagggaacacagagaatttattcttaatgcatgaccttgtcaatgatttagcgcaaattgcatcttcaaaactttgtatcaggttggaagagagccaaggatctcatatgttggaacaaagtcaacacttatcatattcaatgggatatggtggtgagtttgagaaattgacacccctctacaaattggagcagctgaggacattgcttccgacatgtattgatctccctgattgttgtcaccatctaagcaagagggtgctacataacatactgccaagactaacatccttaagggcattatcgttgtcatgctatgagattgttgagttgccaaatgacttgtttatcaaattaaagctcctcagatttttggatatttctcggacagagattaaaaggttgccagattccatttgtgcattgtataacttagagacacttctcctgtcatcttgttatgatcttgaggagctaccgctgcagatggagaagctgattaacttgcgtcatcttgacataagcaacactcgtctcttgaagatgccgctacatctgagcaagttgaaaagcctccaagtgttagtgggagccaaatttcttataggtggtttgagaatggaagatttgggtgaagtacataacttgtacggatctctatcagttgtagagttgcaaaatgtggttgatagaagggaagctgtgaaggcaaagatgagggagaagaatcacgtcgacaggttatatttggagtggagtggaagtagtagtgccgacaattcacaaacagaaagagacatacttgatgagctacgcccccataaaaacataaaagtagtcaaaatcactggatatagagggacaaactttcccaattggctagctgatcctttgtttcttaagctggtaaaattgtctcttagaaactgcaagaactgttattcattgccagcactaggacaactcccttttctgaaattcctttcgattagagagatgcatggaataacagaggtgacggaagaattctatggcagttggtcctccaaaaagccttttaactgtcttgagaagcttgaatttaaagatatgccggagtggaagcaatgggacctactaggaagtggagagttccctatacttgagaagcttttgattgaaaattgccctgaactcagtttggagacggtacccatccaactttcaagtttaaaaagttttgacgtaattggttctcccttggttataaactttcctttaagcatactgcccactaccttgaagagaataaagatatctgattgccagaaattgaaattggaacagccaactggtgagattagtatgtttctggaggaattgacactgattaaatgtgatcgtatagatgatatatcacctgagttactcccaagagcacgcaaattgtgggtacaggattggcacaaccttactaggtttttgattcctactgccactgaaactctcgatatttggaattgtgagaatgttgaaatactttcggtggcatgtggggggacccagatgacgtcactgactattgcctactgtaagaagctgaagtggctgccagaacgtatgcaggaactccttccatctcttaaggaactgcatctgtctaattgtccagaaatagagtcctttcctgaaggtggattgcccttcaatttacaacaacttgcgatcagatattgcaagaaactggtgaacggccgaaaggagtggcatttacagagacgactctgtctcacagcgttaatcatctaccatgatggcagtgacgaagagattgttggtggtgagaattgggagttgccttcctctattcaaaggcttaccatagtgaatctgaaaacattaagcagccaacatctcaaaaacctcacctctcttcaatatctatttattaggggtaatttacctcagattcagccaatgctggaacaaggccagtgttcgcacctcacttcgcttcaaagtctacaaatctcctccctccaatcacttcctgaatcggcactgccctcctccctctctcacctggagatctcccattgccctaatctccaatcacttcctgaatcggcactgccctcctccctctctcagctgaccatcaataattgccctaatctccaatcactttccgaatcaacactgccctcctccctctctcagctggagatctccttttgccctaatctccaatatcttccactaaaagggatgccctcttccctctctgaactatctatttacaaatgcccattgctcaaaccacaactagaatttgacaagggggaatactggccaaatattgctcaatttcccaccataaagatcgatagggaatgcatgtga

SEQ ID NO: 45 - protein, 1282 aa, Artificial Sequence
  protein encoded by mutant R3a
MEIGLAVGGAFLSSALNVLFDRLAPHGDLLNMFQKHKDHVKLLKKLEDILLGLQIVLSDAENKQASNRHVSQWFNKLQNAVDGAENLIEQVNYEALRLKVEGQHQNLAETSNQQVSDLNLCFSDDFFLNIKDKLEETIETLEVLEKQIGRLGLKEHFGSTKQETRTPSTSLVDDSDIFGRQNDIEDLIDRLLSEDASGKKRTVVPIVGMGGLGKTTLAKAVYNDERVQIHFGLKAWFCVSEAFDAFRITKGLLQEIGSFDLKADDNLNQLQVKLKERLKGKKFLIVLDDVWNDNYNKWDELRNVFVQGDIGSKIIVTTRKESVALMMGNEQISMDNLSTESSWSLFKTHAFENMGPMGHPELEEVGKQIAAKCKGLPLALKTLAGMLRSKSEVEEWKRILRSEIWELPHNDILPALMLSYNDLPAHLKRCFSFCAIFPKDYPFRKEQVIHLWIANGLVPQEDVIIEDSGNQYFLELRSRSLFERVPNPSQGNTENLFLMHDLVNDLAQIASSKLCIRLEESQGSHMLEQSQHLSYSMGYGGEFEKLTPLYKLEQLRTLLPTCIDLPDCCHHLSKRVLHNILPRLTSLRALSLSCYEIVELPNDLFIKLKLLRFLDISRTEIKRLPDSICALYNLETLLLSSCYDLEELPLQMEKLINLRHLDISNTRLLKMPLHLSKLKSLQVLVGAKFLIGGLRMEDLGEVHNLYGSLSVVELQNVVDRREAVKAKMREKNHVDRLYLEWSGSSSADNSQTERDILDELRPHKNIKVVKITGYRGTNFPNWLADPLFLKLVKLSLRNCKNCYSLPALGQLPFLKFLSIREMHGITEVTEEFYGSWSSKKPFNCLEKLEFKDMPEWKQWDLLGSGEFPILEKLLIENCPELSLETVPIQLSSLKSFDVIGSPLVINFPLSILPTTLKRIKISDCQKLKLEQPTGEISMFLEELTLIKCDRIDDISPELLPRARKLWVQDWHNLTRFLIPTATETLDIWNCENVEILSVACGGTQMTSLTIAYCKKLKWLPERMQELLPSLKELHLSNCPEIESFPEGGLPFNLQQLAIRYCKKLVNGRKEWHLQRRLCLTALIIYHDGSDEEIVGGENWELPSSIQRLTIVNLKTLSSQHLKNLTSLQYLFIRGNLPQIQPMLEQGQCSHLTSLQSLQISSLQSLPESALPSSLSHLEISHCPNLQSLPESALPSSLSQLTINNCPNLQSLSESTLPSSLSQLEISFCPNLQYLPLKGMPSSLSELSIYKCPLLKPQLEFDKGEYWPNIAQFPTIKIDRECM

SEQ ID NO: 46 - DNA, 3849 bp, Artificial Sequence
  mutant R3a
  allele (0)...(0): GS9
  CDS (1)...(3849)
atggagattggcttagcagttggtggtgcatttctctcttcagctttgaatgttctctttgataggcttgctcctcacggtgatctgctcaacatgtttcagaagcataaggatcatgttaagctcttaaagaagctggaggacattttgctcggtcttcagattgtgctaagtgatgcagagaataaacaagcatcaaatcgacatgtgagccagtggttcaataagcttcagaatgctgtggacggtgctgagaacttgatagaacaagtcaattatgaagctttgaggcttaaggtggaaggccagcatcaaaatcttgcagaaacaagcaaccagcaagtaagtgaccttaacctgtgcttcagtgatgatttctttcttaacataaaggataagttggaagaaaccattgaaacattggaggtgttggaaaagcaaattggtcgccttggcttaaaggaacattttggttcgactaaacaagaaactagaacaccttcaacttctttagttgatgactctgatatctttggaaggcagaatgatatagaggatttgattgaccgtttattatctgaagatgcaagtggaaaaaagcggactgtagttcctattgttggaatgggtggtctgggtaagacaacacttgctaaagcggtttacaatgatgagagagtgcagatacattttggtttgaaagcttggttttgtgtttctgaggcatttgatgctttcagaataacaaaagggttacttcaagaaattggctcatttgacttgaaggctgatgacaatcttaatcagctacaagtcaaattgaaggaaagattaaagggaaagaagtttcttatagttttggatgatgtgtggaatgacaactacaacaagtgggatgaattgagaaatgtttttgtacaaggagatataggaagtaagatcattgtgacgacacgtaaagagagtgttgccttgatgatgggaaatgagcaaattagcatggacaatttgtctactgaatcctcttggtctttatttaaaacacatgcatttgaaaacatgggtcctatgggacatccggaacttgaagaggtcgggaaacaaattgcagctaagtgcaaaggactgcccttagctctgaagacgctcgctggcatgttacgctccaaatcagaggttgaagagtggaaacgtattttgagaagtgaaatatgggagctgccacacaatgacatattaccagcgttgatgttgagctacaatgatcttcccgcacatttaaagcgatgtttttccttttgtgcaatatttcctaaagattatccctttaggaaagaacaagttattcatctgtggattgccaatggtctcgtaccacaggaagatgtaataattgaagattcaggcaaccaatactttctcgagttgaggtcaagatcattattcgaaagggtcccaaatccttctcaagggaacacagagaatttattcttaatgcatgaccttgtcaatgatttagcgcaaattgcatcttcaaaactttgtatcaggttggaagagagccaaggatctcatatgttggaacaaagtcaacacttatcatattcaatgggatatggtggtgagtttgagaaattgacacccctctacaaattggagcagctgaggacattgcttccgacatgtattgatctccctgattgttgtcaccatctaagcaagagggtgctacataacatactgccaagactaacatccttaagggcattatcgttgtcatgctatgagattgttgagttgccaaatgacttgtttatcaaattaaagctcctcagatttttggatatttctcggacagagattaaaaggttgccagattccatttgtgcattgtataacttagagacacttctcctgtcatcttgttatgatcttgaggagctaccgctgcagatggagaagctgattaacttgcgtcatcttgacataagcaacactcgtctcttgaagatgccgctacatctgagcaagttgaaaagcctccaagtgttagtgggagccaaatttcttataggtggtttgagaatggaagatttgggtgaagtacataacttgtacggatctctatcagttgtagagttgcaaaatgtggttgatagaagggaagctgtgaaggcaaagatgagggagaagaatcacgtcgacaggttatatttggagtggagtggaagtagtagtgccgacaattcacaaacagaaagagacatacttgatgagctacgcccccataaaaacataaaagtagtcaaaatcactggatatagagggacaaactttcccaattggctagctgatcctttgtttcttaagctggtaaaattgtctcttagaaactgcaagaactgttattcattgccagcactaggacaactcccttttctgaaattcctttcgattagagagatgcatggaataacagaggtgacggaagaattctatggcagttggtcctccaaaaagccttttaactgtcttgagaagcttgaatttaaagatatgccggagtggaagcaatgggacctactaggaagtggagagttccctatacttgagaagcttttgattgaaaattgccctgaactcagtttggagacggtacccatccaactttcaagtttaaaaagttttgacgtaattggttctcccttggttataaactttcctttaagcatactgcccactaccttgaagagaataaagatatctgattgccagaaattgaaattggaacagccaactggtgagattagtatgtttctggaggaattgacactgattaaatgtgattgtgtagatgatatatcacctgagttactcccaagagcacgcaaattgtgggtacaggattggcacaaccttactaggtttttgattcctactgccactgaaactctcgatatttggaattgtgagaatgttgaaatactttcggtggcatgtggggggacccagatgacgtcactgactattgcctactgtaagaagctgaagtggctgccagaacgtatgcaggaactccttccatctcttaaggaactgcatctgtctaattgtccagaaatagagtcctttcctgaaggtggattgcccttcaatttacaacaacttgcgatcagatattgcaagaaactggtgaacggccgaaaggagtggcatttacagagacgactctgtctcacagcgttaatcatctaccatgatggcagtgacgaagagattgttggtggtgagaattgggagttgccttcctctattcaaaggcttaccatagtgaatctgaaaacattaagcagccaacatctcaaaaacctcacctctcttcaatatctatttattaggggtaatttacctcagattcagccaatgctggaacaaggccagtgttcgcacctcacttcgcttcaaagtctacaaatctcctccctccaatcacttcctgaatcggcactgccctcctccctctctcacctggagatctcccattgccctaatctccaatcacttcctgaatcggcactgccctcctccctctctcagctgaccatcaataattgccctaatctccaatcactttccgaatcaacactgccctcctccctctctcagctggagatctccttttgccctaatctccaatatcttccactaaaagggatgccctcttccctctctgaactatctatttacaaatgcccattgctcaaaccacaactagaatttgacaagggggaatactggccaaatattgctcaatttcccaccataaagatcgatagggaatgcatgtga

SEQ ID NO: 47 - protein, 1282 aa, Artificial Sequence
  protein encoded by mutant R3a
MEIGLAVGGAFLSSALNVLFDRLAPHGDLLNMFQKHKDHVKLLKKLEDILLGLQIVLSDAENKQASNRHVSQWFNKLQNAVDGAENLIEQVNYEALRLKVEGQHQNLAETSNQQVSDLNLCFSDDFFLNIKDKLEETIETLEVLEKQIGRLGLKEHFGSTKQETRTPSTSLVDDSDIFGRQNDIEDLIDRLLSEDASGKKRTVVPIVGMGGLGKTTLAKAVYNDERVQIHFGLKAWFCVSEAFDAFRITKGLLQEIGSFDLKADDNLNQLQVKLKERLKGKKFLIVLDDVWNDNYNKWDELRNVFVQGDIGSKIIVTTRKESVALMMGNEQISMDNLSTESSWSLFKTHAFENMGPMGHPELEEVGKQIAAKCKGLPLALKTLAGMLRSKSEVEEWKRILRSEIWELPHNDILPALMLSYNDLPAHLKRCFSFCAIFPKDYPFRKEQVIHLWIANGLVPQEDVIIEDSGNQYFLELRSRSLFERVPNPSQGNTENLFLMHDLVNDLAQIASSKLCIRLEESQGSHMLEQSQHLSYSMGYGGEFEKLTPLYKLEQLRTLLPTCIDLPDCCHHLSKRVLHNILPRLTSLRALSLSCYEIVELPNDLFIKLKLLRFLDISRTEIKRLPDSICALYNLETLLLSSCYDLEELPLQMEKLINLRHLDISNTRLLKMPLHLSKLKSLQVLVGAKFLIGGLRMEDLGEVHNLYGSLSVVELQNVVDRREAVKAKMREKNHVDRLYLEWSGSSSADNSQTERDILDELRPHKNIKVVKITGYRGTNFPNWLADPLFLKLVKLSLRNCKNCYSLPALGQLPFLKFLSIREMHGITEVTEEFYGSWSSKKPFNCLEKLEFKDMPEWKQWDLLGSGEFPILEKLLIENCPELSLETVPIQLSSLKSFDVIGSPLVINFPLSILPTTLKRIKISDCQKLKLEQPTGEISMFLEELTLIKCDCVDDISPELLPRARKLWVQDWHNLTRFLIPTATETLDIWNCENVEILSVACGGTQMTSLTIAYCKKLKWLPERMQELLPSLKELHLSNCPEIESFPEGGLPFNLQQLAIRYCKKLVNGRKEWHLQRRLCLTALIIYHDGSDEEIVGGENWELPSSIQRLTIVNLKTLSSQHLKNLTSLQYLFIRGNLPQIQPMLEQGQCSHLTSLQSLQISSLQSLPESALPSSLSHLEISHCPNLQSLPESALPSSLSQLTINNCPNLQSLSESTLPSSLSQLEISFCPNLQYLPLKGMPSSLSELSIYKCPLLKPQLEFDKGEYWPNIAQFPTIKIDRECM

SEQ ID NO: 48 - DNA, 3849 bp, Artificial Sequence
  mutant R3a
  allele (0)...(0): GS12
  CDS (1)...(3849)
atggagattggcttagcagttggtggtgcatttctctcttcagctttgaatgttctctttgataggcttgctcctcacggtgatctgctcaacatgtttcagaagcataaggatcatgttaagctcttaaagaagctggaggacattttgctcggtcttcagattgtgctaagtgatgcagagaataaacaagcatcaaatcgacatgtgagccagtggttcaataagcttcagaatgctgtggacggtgctgagaacttgatagaacaagtcaattatgaagctttgaggcttaaggtggaaggccagcatcaaaatcttgcagaaacaagcaaccagcaagtaagtgaccttaacctgtgcttcagtgatgatttctttcttaacataaaggataagttggaagaaaccattgaaacattggaggtgttggaaaagcaaattggtcgccttggcttaaaggaacattttggttcgactaaacaagaaactagaacaccttcaacttctttagttgatgactctgatatctttggaaggcagaatgatatagaggatttgattgaccgtttattatctgaagatgcaagtggaaaaaagcggactgtagttcctattgttggaatgggtggtctgggtaagacaacacttgctaaagcggtttacaatgatgagagagtgcagatacattttggtttgaaagcttggttttgtgtttctgaggcatttgatgctttcagaataacaaaagggttacttcaagaaattggctcatttgacttgaaggctgatgacaatcttaatcagctacaagtcaaattgaaggaaagattaaagggaaagaagtttcttatagttttggatgatgtgtggaatgacaactacaacaagtgggatgaattgagaaatgtttttgtacaaggagatataggaagtaagatcattgtgacgacacgtaaagagagtgttgccttgatgatgggaaatgagcaaattagcatggacaatttgtctactgaatcctcttggtctttatttaaaacacatgcatttgaaaacatgggtcctatgggacatccggaacttgaagaggtcgggaaacaaattgcagctaagtgcaaaggactgcccttagctctgaagacgctcgctggcatgttacgctccaaatcagaggttgaagagtggaaacgtattttgagaagtgaaatatgggagctgccacacaatgacatattaccagcgttgatgttgagctacaatgatcttcccgcacatttaaagcgatgtttttccttttgtgcaatatttcctaaagattatccctttaggaaagaacaagttattcatctgtggattgccaatggtctcgtaccacaggaagatgtaataattgaagattcaggcaaccaatactttctcgagttgaggtcaagatcattattcgaaagggtcccaaatccttctcaagggaacacagagaatttattcttaatgcatgaccttgtcaatgatttagcgcaaattgcatcttcaaaactttgtatcaggttggaagagagccaaggatctcatatgttggaacaaagtcaacacttatcatattcaatgggatatggtggtgagtttgagaaattgacacccctctacaaattggagcagctgaggacattgcttccgacatgtattgatctccctgattgttgtcaccatctaagcaagagggtgctacataacatactgccaagactaacatccttaagggcattatcgttgtcatgctatgagattgttgagttgccaaatgacttgtttatcaaattaaagctcctcagatttttggatatttctcggacagagattaaaaggttgccagattccatttgtgcattgtataacttagagacacttctcctgtcatcttgttatgatcttgaggagctaccgctgcagatggagaagctgattaacttgcgtcatcttgacataagcaacactcgtctcttgaagatgccgctacatctgagcaagttgaaaagcctccaagtgttagtgggagccaaatttcttataggtggtttgagaatggaagatttgggtgaagtacataacttgtacggatctctatcagttgtagagttgcaaaatgtggttgatagaagggaagctgtgaaggcaaagatgagggagaagaatcacgtcgacaggttatatttggagtggagtggaagtagtagtgccgacaattcacaaacagaaagagacatacttgatgagctacgcccccataaaaacataaaagtagtcaaaatcactggatatagagggacaaactttcccaattggctagctgatcctttgtttcttaagctggtaaaattgtctcttagaaactgcaagaactgttattcattgccagcactaggacaactcccttttctgaaattcctttcgattagagagatgcatggaataacagaggtgacggaagaattctatggcagttggtcctccaaaaagccttttaactgtcttgagaagcttgaatttaaagatatgccggagtggaagcaatgggacctactaggaagtggagagttccctatacttgagaagcttttgattgaaaattgccctgaactcagtttggagacggtacccatccaactttcaagtttaaaaagttttgacgtaattggttctcccttggttataaactttcctttaagcatactgcccactaccttgaagagaataaagatatctgattgccagaaattgaaattggaacagccaactggtgagattagtatgtttctggaggaattgacactgattaaatgtgattgtatagatgatatatcacctgagttactcccaagagcacgcaaattgtgggtacaggattggcacaaccttactaggtttttgattcctactgccactaaaactctcgatatttggaattgtgagaatgttgaaatactttcggtggcatgtggggggacccagatgacgtcactgactattgcctactgtaagaagctgaagtggctgccagaacgtatgcaggaactccttccatctcttaaggaactgcatctgtctaattgtccagaaatagagtcctttcctgaaggtggattgcccttcaatttacaacaacttgcgatcagatattgcaagaaactggtgaacggccgaaaggagtggcatttacagagacgactctgtctcacagcgttaatcatctaccatgatggcagtgacgaagagattgttggtggtgagaattgggagttgccttcctctattcaaaggcttaccatagtgaatctgaaaacattaagcagccaacatctcaaaaacctcacctctcttcaatatctatttattaggggtaatttacctcagattcagccaatgctggaacaaggccagtgttcgcacctcacttcgcttcaaagtctacaaatctcctccctccaatcacttcctgaatcggcactgccctcctccctctctcacctggagatctcccattgccctaatctccaatcacttcctgaatcggcactgccctcctccctctctcagctgaccatcaataattgccctaatctccaatcactttccgaatcaacactgccctcctccctctctcagctggagatctccttttgccctaatctccaatatcttccactaaaagggatgccctcttccctctctgaactatctatttacaaatgcccattgctcaaaccacaactagaatttgacaagggggaatactggccaaatattgctcaatttcccaccataaagatcgatagggaatgcatgtga

SEQ ID NO: 49 - protein, 1282 aa, Artificial Sequence
  protein encoded by mutant R3a
MEIGLAVGGAFLSSALNVLFDRLAPHGDLLNMFQKHKDHVKLLKKLEDILLGLQIVLSDAENKQASNRHVSQWFNKLQNAVDGAENLIEQVNYEALRLKVEGQHQNLAETSNQQVSDLNLCFSDDFFLNIKDKLEETIETLEVLEKQIGRLGLKEHFGSTKQETRTPSTSLVDDSDIFGRQNDIEDLIDRLLSEDASGKKRTVVPIVGMGGLGKTTLAKAVYNDERVQIHFGLKAWFCVSEAFDAFRITKGLLQEIGSFDLKADDNLNQLQVKLKERLKGKKFLIVLDDVWNDNYNKWDELRNVFVQGDIGSKIIVTTRKESVALMMGNEQISMDNLSTESSWSLFKTHAFENMGPMGHPELEEVGKQIAAKCKGLPLALKTLAGMLRSKSEVEEWKRILRSEIWELPHNDILPALMLSYNDLPAHLKRCFSFCAIFPKDYPFRKEQVIHLWIANGLVPQEDVIIEDSGNQYFLELRSRSLFERVPNPSQGNTENLFLMHDLVNDLAQIASSKLCIRLEESQGSHMLEQSQHLSYSMGYGGEFEKLTPLYKLEQLRTLLPTCIDLPDCCHHLSKRVLHNILPRLTSLRALSLSCYEIVELPNDLFIKLKLLRFLDISRTEIKRLPDSICALYNLETLLLSSCYDLEELPLQMEKLINLRHLDISNTRLLKMPLHLSKLKSLQVLVGAKFLIGGLRMEDLGEVHNLYGSLSVVELQNVVDRREAVKAKMREKNHVDRLYLEWSGSSSADNSQTERDILDELRPHKNIKVVKITGYRGTNFPNWLADPLFLKLVKLSLRNCKNCYSLPALGQLPFLKFLSIREMHGITEVTEEFYGSWSSKKPFNCLEKLEFKDMPEWKQWDLLGSGEFPILEKLLIENCPELSLETVPIQLSSLKSFDVIGSPLVINFPLSILPTTLKRIKISDCQKLKLEQPTGEISMFLEELTLIKCDCIDDISPELLPRARKLWVQDWHNLTRFLIPTATKTLDIWNCENVEILSVACGGTQMTSLTIAYCKKLKWLPERMQELLPSLKELHLSNCPEIESFPEGGLPFNLQQLAIRYCKKLVNGRKEWHLQRRLCLTALIIYHDGSDEEIVGGENWELPSSIQRLTIVNLKTLSSQHLKNLTSLQYLFIRGNLPQIQPMLEQGQCSHLTSLQSLQISSLQSLPESALPSSLSHLEISHCPNLQSLPESALPSSLSQLTINNCPNLQSLSESTLPSSLSQLEISFCPNLQYLPLKGMPSSLSELSIYKCPLLKPQLEFDKGEYWPNIAQFPTIKIDRECM

SEQ ID NO: 50 - DNA, 3849 bp, Artificial Sequence
  mutant R3a
  allele (0)...(0): GS15
  CDS (1)...(3849)
atggagattggcttagcagttggtggtgcatttctctcttcagctttgaatgttctctttgataggcttgctcctcacggtgatctgctcaacatgtttcagaagcataaggatcatgttaagctcttaaagaagctggaggacattttgctcggtcttcagattgtgctaagtgatgcagagaataaacaagcatcaaatcgacatgtgagccagtggttcaataagcttcagaatgctgtggacggtgctgagaacttgatagaacaagtcaattatgaagctttgaggcttaaggtggaaggccagcatcaaaatcttgcagaaacaagcaaccagcaagtaagtgaccttaacctgtgcttcagtgatgatttctttcttaacataaaggataagttggaagaaaccattgaaacattggaggtgttggaaaagcaaattggtcgccttggcttaaaggaacattttggttcgactaaacaagaaactagaacaccttcaacttctttagttgatgactctgatatctttggaaggcagaatgatatagaggatttgattgaccgtttattatctgaagatgcaagtggaaaaaagcggactgtagttcctattgttggaatgggtggtctgggtaagacaacacttgctaaagcggtttacaatgatgagagagtgcagatacattttggtttgaaagcttggttttgtgtttctgaggcatttgatgctttcagaataacaaaagggttacttcaagaaattggctcatttgacttgaaggctgatgacaatcttaatcagctacaagtcaaattgaaggaaagattaaagggaaagaagtttcttatagttttggatgatgtgtggaatgacaactacaacaagtgggatgaattgagaaatgtttttgtacaaggagatataggaagtaagatcattgtgacgacacgtaaagagagtgttgccttgatgatgggaaatgagcaaattagcatggacaatttgtctactgaatcctcttggtctttatttaaaacacatgcatttgaaaacatgggtcctatgggacatccggaacttgaagaggtcgggaaacaaattgcagctaagtgcaaaggactgcccttagctctgaagacgctcgctggcatgttacgctccaaatcagaggttgaagagtggaaacgtattttgagaagtgaaatatgggagctgccacacaatgacatattaccagcgttgatgttgagctacaatgatcttcccgcacatttaaagcgatgtttttccttttgtgcaatatttcctaaagattatccctttaggaaagaacaagttattcatctgtggattgccaatggtctcgtaccacaggaagatgtaataattgaagattcaggcaaccaatactttctcgagttgaggtcaagatcattattcgaaagggtcccaaatccttctcaagggaacacagagaatttattcttaatgcatgaccttgtcaatgatttagcgcaaattgcatcttcaaaactttgtatcaggttggaagagagccaaggatctcatatgttggaacaaagtcaacacttatcatattcaatgggatatggtggtgagtttgagaaattgacacccctctacaaattggagcagctgaggacattgcttccgacatgtattgatctccctgattgttgtcaccatctaagcaagagggtgctacataacatactgccaagactaacatccttaagggcattatcgttgtcatgctatgagattgttgagttgccaaatgacttgtttatcaaattaaagctcctcagatttttggatatttctcggacagagattaaaaggttgccagattccatttgtgcattgtataacttagagacacttctcctgtcatcttgttatgatcttgaggagctaccgctgcagatggagaagctgattaacttgcgtcatcttgacataagcaacactcgtctcttgaagatgccgctacatctgagcaagttgaaaagcctccaagtgttagtgggagccaaatttcttataggtggtttgagaatggaagatttgggtgaagtacataacttgtacggatctctatcagttgtagagttgcaaaatgtggttgatagaagggaagctgtgaaggcaaagatgagggagaagaatcacgtcgacaggttatatttggagtggagtggaagtagtagtgccgacaattcacaaacagaaagagacatacttgatgagctacgcccccataaaaacataaaagtagtcaaaatcactggatatagagggacaaactttcccaattggctagctgatcctttgtttcttaagctggtaaaattgtctcttagaaactgcaagaactgttattcattgccagcactaggacaactcccttttctgaaattcctttcgattagagagatgcatggaataacagaggtgacggaagaattctatggcagttggtcctccaaaaagccttttaactgtcttgagaagcttgaatttaaagatatgccggagtggaagcaatgggacctactaggaagtggagagttccctatacttgagaagcttttgattgaaaattgccctgaactcagtttggagacggtacccatccaactttcaagtttaaaaagttttgacgtaattggttctcccttggttataaactttcctttaagcatactgcccactaccttgaagagaataaagatatctgattgccagaaattgaaattggaacagccaactggtgagattagtatgtttctggaggaattgacactgattaaatgtgattgtatagatgatatatcacctgagttactcccaagagcacgcaaattgtgggtacaggattggcacaaccttactaggtttttgattcctactgccactgaaactctcgatatttggaattgtgagaatgttgaaatactttcggtggcatgtggggggacccagatgacgtcactgactattgcctactgtaagaagctgaagtggctgccagaacgtatgcaggaactccttccatctcttaaggaactgcatctgtctaattgtccagaaatagagtcctttcctgaaggtggattgcccttcaatttacaacaacttgcgatcagatattgcaagaaactggtgaacggccgaaaggagtggcatttacagagacgactctgtctcacagcgttaatcatctaccatgatggcagtgacgaagagattgttggtggtgagaattgggagttgccttcctctattcaaaggcttaccatagtgaatctgaaaacattaagcagccaacatctcaaaaacctcacctctcttcaatatctatttattaggggtaatttacctcagattcagccaatgctggaacaaggccagtgttcgcacctcacttcgcttcaaagtctacaaatctcctccctccaatcacttcctgaatcggcactgccctcctccctctctcacctggagatctcccattgccctaatctccaatcacttcctgaatcggcactgccctcctccctctctcagctgaccatcaataattgccctaatctccaatcactttccgaatcaacactgccctcctccctctctcagctggagatctccttttgccctaatctccaatatcttccactaaaagggatgccctcttccctctctgaactatctatttacagatgcccattgctcaaaccacaactagaatttgacaagggggaatactggccaaatattgctcaatttcccaccataaagatcgatagggaatgcatgtga

SEQ ID NO: 51 - protein, 1282 aa, Artificial Sequence
  protein encoded by mutant R3a
MEIGLAVGGAFLSSALNVLFDRLAPHGDLLNMFQKHKDHVKLLKKLEDILLGLQIVLSDAENKQASNRHVSQWFNKLQNAVDGAENLIEQVNYEALRLKVEGQHQNLAETSNQQVSDLNLCFSDDFFLNIKDKLEETIETLEVLEKQIGRLGLKEHFGSTKQETRTPSTSLVDDSDIFGRQNDIEDLIDRLLSEDASGKKRTVVPIVGMGGLGKTTLAKAVYNDERVQIHFGLKAWFCVSEAFDAFRITKGLLQEIGSFDLKADDNLNQLQVKLKERLKGKKFLIVLDDVWNDNYNKWDELRNVFVQGDIGSKIIVTTRKESVALMMGNEQISMDNLSTESSWSLFKTHAFENMGPMGHPELEEVGKQIAAKCKGLPLALKTLAGMLRSKSEVEEWKRILRSEIWELPHNDILPALMLSYNDLPAHLKRCFSFCAIFPKDYPFRKEQVIHLWIANGLVPQEDVIIEDSGNQYFLELRSRSLFERVPNPSQGNTENLFLMHDLVNDLAQIASSKLCIRLEESQGSHMLEQSQHLSYSMGYGGEFEKLTPLYKLEQLRTLLPTCIDLPDCCHHLSKRVLHNILPRLTSLRALSLSCYEIVELPNDLFIKLKLLRFLDISRTEIKRLPDSICALYNLETLLLSSCYDLEELPLQMEKLINLRHLDISNTRLLKMPLHLSKLKSLQVLVGAKFLIGGLRMEDLGEVHNLYGSLSVVELQNVVDRREAVKAKMREKNHVDRLYLEWSGSSSADNSQTERDILDELRPHKNIKVVKITGYRGTNFPNWLADPLFLKLVKLSLRNCKNCYSLPALGQLPFLKFLSIREMHGITEVTEEFYGSWSSKKPFNCLEKLEFKDMPEWKQWDLLGSGEFPILEKLLIENCPELSLETVPIQLSSLKSFDVIGSPLVINFPLSILPTTLKRIKISDCQKLKLEQPTGEISMFLEELTLIKCDCIDDISPELLPRARKLWVQDWHNLTRFLIPTATETLDIWNCENVEILSVACGGTQMTSLTIAYCKKLKWLPERMQELLPSLKELHLSNCPEIESFPEGGLPFNLQQLAIRYCKKLVNGRKEWHLQRRLCLTALIIYHDGSDEEIVGGENWELPSSIQRLTIVNLKTLSSQHLKNLTSLQYLFIRGNLPQIQPMLEQGQCSHLTSLQSLQISSLQSLPESALPSSLSHLEISHCPNLQSLPESALPSSLSQLTINNCPNLQSLSESTLPSSLSQLEISFCPNLQYLPLKGMPSSLSELSIYRCPLLKPQLEFDKGEYWPNIAQFPTIKIDRECM

SEQ ID NO: 52 - DNA, 3849 bp, Artificial Sequence
  mutant R3a
  allele (0)...(0): CT*
  CDS (1)...(3849)
atggagattggcttagcagttggtggtgcatttctctcttcagctttgaatgttctctttgataggcttgctcctcacggtgatctgctcaacatgtttcagaagcataaggatcatgttaagctcttaaagaagctggaggacattttgctcggtcttcagattgtgctaagtgatgcagagaataaacaagcatcaaatcgacatgtgagccagtggttcaataagcttcagaatgctgtggacggtgctgagaacttgatagaacaagtcaattatgaagctttgaggcttaaggtggaaggccagcatcaaaatcttgcagaaacaagcaaccagcaagtaagtgaccttaacctgtgcttcagtgatgatttctttcttaacataaaggataagttggaagaaaccattgaaacattggaggtgttggaaaagcaaattggtcgccttggcttaaaggaacattttggttcgactaaacaagaaactagaacaccttcaacttctttagttgatgactctgatatctttggaaggcagaatgatatagaggatttgattgaccgtttattatctgaagatgcaagtggaaaaaagcggactgtagttcctattgttggaatgggtggtctgggtaagacaacacttgctaaagcggtttacaatgatgagagagtgcagatacattttggtttgaaagcttggttttgtgtttctgaggcatttgatgctttcagaataacaaaagggttacttcaagaaattggctcatttgacttgaaggctgatgacaatcttaatcagctacaagtcaaattgaaggaaagattaaagggaaagaagtttcttatagttttggatgatgtgtggaatgacaactacaacaagtgggatgaattgagaaatgtttttgtacaaggagatataggaagtaagatcattgtgacgacacgtaaagagagtgttgccttgatgatgggaaatgagcaaattagcatggacaatttgtctactgaatcctcttggtctttatttaaaacacatgcatttgaaaacatgggtcctatgggacatccggaacttgaagaggtcgggaaacaaattgcagctaagtgcaaaggactgcccttagctctgaagacgctcgctggcatgttacgctccaaatcagaggttgaagagtggaaacgtattttgagaagtgaaatatgggagctgccacacaatgacatattaccagcgttgatgttgagctacaatgatcttcccgcacatttaaagcgatgtttttccttttgtgcaatatttcctaaagattatccctttaggaaagaacaagttattcatctgtggattgccaatggtctcgtaccacaggaagatgtaataattgaagattcaggcaaccaatactttctcgagttgaggtcaagatcattattcgaaagggtcccaaatccttctcaagggaacacagagaatttattcttaatgcatgaccttgtcaatgatttagcgcaaattgcatcttcaaaactttgtatcaggttggaagagagccaaggatctcatatgttggaacaaagtcaacacttatcatattcaatgggatatggtggtgagtttgagaaattgacacccctctacaaattggagcagctgaggacattgcttccgacatgtattgatctccctgattgttgtcaccatctaagcaagagggtgctacataacatactgccaagactaacatccttaagggcattatcgttgtcatgctatgagattgttgagttgccaaatgacttgtttatcaaattaaagctcctcagatttttggatatttctcggacagagattaaaaggttgccagattccatttgtgcattgtataacttagagacacttctcctgtcatcttgttatgatcttgaggagctaccgctgcagatggagaagctgattaacttgcgtcatcttgacataagcaacactcgtctcttgaagatgccgctacatctgagcaagttgaaaagcctccaagtgttagtgggagccaaatttcttataggtggtttgagaatggaagatttgggtgaagtacataacttgtacggatctctatcagttgtagagttgcaaaatgtggttgatagaagggaagctgtgaaggcaaagatgagggagaagaatcacgtcgacaggttatatttggagtggagtggaagtagtagtgccgacaattcacaaacagaaagagacatacttgatgagctacgcccccataaaaacataaaagtagtcaaaatcactggatatagagggacaaactttcccaattggctagctgatcctttgtttcttaagctggtaaaattgtctcttagaaactgcaagaactgttattcattgccagcactaggacaactcccttttctgaaattcctttcgattagagagatgcatggaataacagaggtgacggaagaattctatggcagttggtcctccaaaaagccttttaactgtcttgagaagcttgaatttaaagatatgccggagtggaagcaatgggacctactaggaagtggagagttccctatacttgagaagcttttgattgaaaattgccctgaactcagtttggagacggtacccatccaactttcaagtttaaaaagttttgacgtaattggttctcccttggttataaactttcctttaagcatactgcccactaccttgaagagaataaagatatctgattgccagaaattgaaattggaacagccaactggtgagattagtatgtttctgaaggaattgacactgattaaatgtgattgtatagatgatatatcacctgagttactcccaagagcacgcaaattgtgggtacaggattggcacaaccttactaggtttttgattcctactgccactgaaactctcgatatttggaattgtgagaatgttgaaatactttcggtggcatgtggggggacccagatgacgtcactgactattgcctactgtaagaagctgaagtggctgccagaacgtatgcaggaactccttccatctcttaaggaactgcatctgtctaattgtccagaaatagagtcctttcctgaaggtggattgcccttcaatttacaacaacttgcgatcagatattgcaagaaactggtgaacggccgaaaggagtggcatttacagagacgactctgtctcacagcgttaatcatctaccatgatggcagtgacgaagagattgttggtggtgagaattgggagttgccttcctctattcaaaggcttaccatagtgaatctgaaaacattaagcagccaacatctcaaaaacctcacctctcttcaatatctatttattaggggtaatttacctcagattcagccaatgctggaacaaggccagtgttcgcacctcacttcgcttcaaagtctacaaatctcctccctccaatcacttcctgaatcggcactgccctcctccctctctcacctggagatctcccattgccctaatctccaatcacttcctgaatcggcactgccctcctccctctctcagctgaccatcaataattgccctaatctccaatcactttccgaatcaacactgccctcctccctctctcagctggagatctccttttgccctaatctccaatatcttccactaaaagggatgccctcttccctctctgaactatctatttacaaatgcccattgctcaaaccacaactagaatttgacaagggggaatactggccaaatattgctcaatttcccaccataaagatcgatagggaatgcatgtga

SEQ ID NO: 53 - protein, 1282 aa, Artificial Sequence
  protein encoded by mutant R3a
MEIGLAVGGAFLSSALNVLFDRLAPHGDLLNMFQKHKDHVKLLKKLEDILLGLQIVLSDAENKQASNRHVSQWFNKLQNAVDGAENLIEQVNYEALRLKVEGQHQNLAETSNQQVSDLNLCFSDDFFLNIKDKLEETIETLEVLEKQIGRLGLKEHFGSTKQETRTPSTSLVDDSDIFGRQNDIEDLIDRLLSEDASGKKRTVVPIVGMGGLGKTTLAKAVYNDERVQIHFGLKAWFCVSEAFDAFRITKGLLQEIGSFDLKADDNLNQLQVKLKERLKGKKFLIVLDDVWNDNYNKWDELRNVFVQGDIGSKIIVTTRKESVALMMGNEQISMDNLSTESSWSLFKTHAFENMGPMGHPELEEVGKQIAAKCKGLPLALKTLAGMLRSKSEVEEWKRILRSEIWELPHNDILPALMLSYNDLPAHLKRCFSFCAIFPKDYPFRKEQVIHLWIANGLVPQEDVIIEDSGNQYFLELRSRSLFERVPNPSQGNTENLFLMHDLVNDLAQIASSKLCIRLEESQGSHMLEQSQHLSYSMGYGGEFEKLTPLYKLEQLRTLLPTCIDLPDCCHHLSKRVLHNILPRLTSLRALSLSCYEIVELPNDLFIKLKLLRFLDISRTEIKRLPDSICALYNLETLLLSSCYDLEELPLQMEKLINLRHLDISNTRLLKMPLHLSKLKSLQVLVGAKFLIGGLRMEDLGEVHNLYGSLSVVELQNVVDRREAVKAKMREKNHVDRLYLEWSGSSSADNSQTERDILDELRPHKNIKVVKITGYRGTNFPNWLADPLFLKLVKLSLRNCKNCYSLPALGQLPFLKFLSIREMHGITEVTEEFYGSWSSKKPFNCLEKLEFKDMPEWKQWDLLGSGEFPILEKLLIENCPELSLETVPIQLSSLKSFDVIGSPLVINFPLSILPTTLKRIKISDCQKLKLEQPTGEISMFLKELTLIKCDCIDDISPELLPRARKLWVQDWHNLTRFLIPTATETLDIWNCENVEILSVACGGTQMTSLTIAYCKKLKWLPERMQELLPSLKELHLSNCPEIESFPEGGLPFNLQQLAIRYCKKLVNGRKEWHLQRRLCLTALIIYHDGSDEEIVGGENWELPSSIQRLTIVNLKTLSSQHLKNLTSLQYLFIRGNLPQIQPMLEQGQCSHLTSLQSLQISSLQSLPESALPSSLSHLEISHCPNLQSLPESALPSSLSQLTINNCPNLQSLSESTLPSSLSQLEISFCPNLQYLPLKGMPSSLSELSIYKCPLLKPQLEFDKGEYWPNIAQFPTIKIDRECM

SEQ ID NO: 54 - protein, 141 aa, Phytophthora palmivora
  VARIANT (1)...(141): AJ1A
MRLASFLSATVVAIYFAACSATADFDHTKALMNGSPVDSQDSTDKRLLRAHQENEASTEERAPNINFNLAQLTERADAKKLAKQLMGNDKLAKAAYIWWQHNGVTLTKLDEFLKLASRKTQGRKYDQIYNAYMMHLGYTGV

SEQ ID NO: 55 - protein, 141 aa, Phytophthora palmivora
  VARIANT (1)...(141): AJ1B
MRLASFLSATMVTIYFAACSATTDFDQINVLMNGSPGHSHASTGKRLLRAHQENEASTEERAPNINFNLAQLTERADAKKLAKQLMGNDKLAKAAYIWWQHNGVTLTKLDEFLKLASRKTQGRKYDQIYNGYTMHLGYTGV

SEQ ID NO: 56 - protein, 138 aa, Phytophthora palmivora
  VARIANT (1)...(138): AJ2A
MRLASFLSATVVAIYFAACSATADFDHTKVFMNGSPVHPHDSTGERLLRIHQEKEASTEERTPNFNLAELTKKKHAAALAEQLMGDHRLAKAANIWWENNGVTLDKLDKFLKLASKKTKANYNQLYNGYMMHLGLTAY

SEQ ID NO: 57 - protein, 141 aa, Phytophthora palmivora
  VARIANT (1)...(141): AJ3A
MRLVSFLSATVVTIYFAACSATTDFDQINVLMNGSPGHSHASTGKRLLRAHQENEASTEERAPNINFNLAQLTERADAKKLAKQLMGNDKLAKAAYIWWQHNGVTLTKLDEFLKLASRKTQGRKYDQIYNAYMMHLGYTGV

SEQ ID NO: 58 - protein, 138 aa, Phytophthora palmivora
  VARIANT (1)...(138): AJ4A
MRLASFLSATVVAIYFAACSATTDFDQTKVLMNGSPVHPHDSTGKRLLRAHQENEISTEERTPSFNLAQLTKRNDAKKLADKLMGDHRLANAANIWWQHHEITLTKLDEFLKRASKKTKANYNDIYNGYMMHLGLTGY

SEQ ID NO: 59 - protein, 138 aa, Phytophthora palmivora
  VARIANT (1)...(138): AJ5A
MRLASFLSATVVAIYFAACSATADFDHTKALMNGSPVDSQDSTDKRLLRTHQEKETSAEERTPNFNLAELTKKKHAAALAEQLMGDHKLADAAYIWWQHNQVTLTKLDEFLKRASKKTKANYDQIYNGYTMHLGLTGY

SEQ ID NO: 60 - protein, 141 aa, Phytophthora palmivora
  VARIANT (1)...(141): L1B
MRLASFLSATVVAIYFAACSATADSDQTKVFMNGSPVHPHDSTGKRLLRAHQENEASTEERTPNINFNLAQLTERADAKKLAKQLMGNDKLAKAAYIWWQHNGVTLTKLDDFLKLASRKTQGRKYDQIYNAYMMHLGYTGV

SEQ ID NO: 61 - protein, 139 aa, Phytophthora palmivora
  VARIANT (1)...(139): L2A
MRLASFLSTTVVAIYFAVCSATTDFDQINVLMNGSPGHSHASTGKRLLRAHQENEASTEERTPSFNLAQLTKSKHAAALAEQLMGDHKLADAAYIWWQHNGVTLTKLDDFLKLASRKTQGRKYDQIYNAYMMHLGYTGV

SEQ ID NO: 62 - protein, 138 aa, Phytophthora palmivora
  VARIANT (1)...(138): L3A
MRLASFLSATVVAIYFAACSATADFDQTEVFVNGSPVHPHGSTGKRLLRTHQDKEASAEERTPNFNLAELTKNKHAAALAEQLMGDHKLAKAAYVWWQHNQVTLTKLDEFLQLASKKTEANYNDIYNGYMMHLGLTGY

SEQ ID NO: 63 - protein, 141 aa, Phytophthora palmivora
  VARIANT (1)...(141): L3B
MRLASFLSTTVVAIYFAVCSATADSDQTKVLMNGSPVHPHGSIGKRLLRAHQENEASTEERTPNINFNLAQLTERADAKKLAKQLMGNDKLAKAAYIWWQHNGVTLTKLDDFLKLASRKTQGRKYDQIYNAYMMHLGYTGV

SEQ ID NO: 64 - protein, 138 aa, Phytophthora palmivora
  VARIANT (1)...(138): L4A
MRLVSFLSATVVAIYFAACSATADFDQTKVFMNGSPVHPHDSTGERLLRIHQEKEASTEERTPNFNLAELTKKKHAAALAEQLMGDHKLADAAYIWWQHNRVTLDKLDKFLKLASKKTKANYDQLYNGYMMHLGLTAY

SEQ ID NO: 65 - protein, 141 aa, Phytophthora palmivora
  CONFLICT (1)...(141): L5A
MRLASFLSATMVAIYFAACSATTDFDQINVLMNGSPGHSHASTGKRLLRAHQENEASTEERTPNINFNLAQLTERADAKKLAKQLMGNDKLAKAAYIWWQHHEITLDKLDEFLKLASRKTQGRKYDQIYNAYMMHLGYTGV

SEQ ID NO: 66 - protein, 139 aa, Phytophthora palmivora
  VARIANT (1)...(139): L6A
MRLVSFLSATVVAIYFAACSATADFDQTKVFMNGSPGHSHASTGKRLLRAHQENDASTEERTPNFNLAELTKRNDAKKLADKLMGDHRLANAANIWWQHHEITLDKLDEFLKLASRKTQGRKYDQIYNGYTMHLGLTGV

SEQ ID NO: 67 - protein, 139 aa, Phytophthora palmivora
  VARIANT (1)...(139): L6B
MRLASFLSTTVVAIYFAVCSATADSDQTKVLMNGSPVHPHGSIGKRLLRAHQENDASTEERTPNFNLAELTKRNDAKKLADKLMGDHRLANAANIWWQHHEITLDKLDEFLKLASRKTQGRKYDQIYNGYTMHLGLTGV

SEQ ID NO: 68 - protein, 138 aa, Phytophthora palmivora
  VARIANT (1)...(138): L7A
MRLASFLSTTVVAIYFAVCSATADSDQTKVFMNGSPVHPHDSTGKRLLRAHQENEISTEERTPSFNLAQLTKSKHAAALAEQLMGDHKLAKAAYVWWQHNQVTLTKLDEFLKLASKKTKANYDQLYNGYMMHLGLTAY

SEQ ID NO: 69 - protein, 134 aa, Phytophthora palmivora
  VARIANT (1)...(134): NODE_55578
SFLSATVVAIYFAACSATTDFDQTKVLMNGSPVHPHDSTGKRLLRAHQENEISTEERTPSFNLAQLTKSKHAAALAEQLMGDHRLAKAAYVWWENNEVTLTKLDEFLKRASKKTKADYNDLYNGYMMHLGYTGV

SEQ ID NO: 70 - protein, 141 aa, Phytophthora palmivora
  VARIANT (1)...(141): NODE_238692
MRLASFLSATMVAIYFAACSATTDFDQINVLMNGSPGHSHASTGKRLLRAHQENEASTEERTPNINFNLAQLTERADAKKLAKQLMGNDKLAKAAYIWWQHNGVTLTKLDDFLKLASRKTQGRKYDQIYNAYMMHLGYTGV

SEQ ID NO: 71 - protein, 139 aa, Phytophthora palmivora; identical to SEQ ID NO: 67
  VARIANT (1)...(139): NODE_248107

SEQ ID NO: 72 - protein, 129 aa, Phytophthora palmivora
  VARIANT (1)...(128): NODE_279538
TVVAIYFAACSATADFDQTKVFMNGSPVHPHDSTGERLLRIHQEKEASTEERTPNFNLAELTKKKHAAALAEQLMGDHKLADAAYIWWQHNRVTLDKLDKFLKLASKKTKANYDQLYNGYMMHLGLTAY

SEQ ID NO: 73 - protein, 128 aa, Phytophthora palmivora
  VARIANT (1)...(128): NODE_156862
VVAIYFAACSATADFDQTEVFVNGSPVHPHGSTGKRLLRTHQDKEASAEERTPNFNLAELTKNKHAAALAEQLMGDHKLAKAAYVWWQHNQVTLTKLDEFLQLASKKTEANYNDIYNGYMMHLGLTGY

SEQ ID NO: 74 - protein, 138 aa, Phytophthora palmivora
  VARIANT (1)...(138): AJ2B
MRLVSFLSATVVAIYFAACSATADFDQTKVFMNGSPVHPHDSTGERLLRIHQEKEASTEERTPNFNLAELTKKKHAAALAEQLMGDHRLAKAANIWWENNGVTLDKLDKFLKLASKKTKANYNQLYNGYMMHLGLTAY

SEQ ID NO: 75 - protein, 141 aa, Phytophthora palmivora
  VARIANT (1)...(141): AJ3B
MRLASFLSATVVAIYFAACSATADFDHTKALMNGSPGHSHASTGKRLLRAHQENEASTEERAPNINFNLAQLTERADAKKLAKQLMGNDKLAKAAYIWWQHNGVTLTKLDEFLKLASRKTQGRKYDQIYNGYTMHLGLSGV

SEQ ID NO: 76 - protein, 141 aa, Phytophthora palmivora
  VARIANT (1)...(141): AJ6B
MRLATFLSATVVAIYFAACSATADSDQTKIFMNGSPVHPHDSTGKRLLRTHQEKEASTEERAPNINFNLAQLTERADAKKLADKLMGDHRLANAANIWWQHHEITLDKLDEFLKLASRKTQGRKYDQIYNGYTMHLGLSGV

SEQ ID NO: 77 - protein, 140 aa, Phytophthora palmivora
  VARIANT (1)...(140): AJ7A
MRLASFLSATVVAIYFAACSATADFDHTKAFMNGSPVHPHDSTGKRLLRTHQEKEASTEERAPTINFNLAELTKKKHAAALAEKLMGDHSLANTANIWWKNDGVTLDKLDKFLKLASKKTKANYNQLYNGYMMHLGLTAY

SEQ ID NO: 78 - protein, 139 aa, Phytophthora palmivora
  VARIANT (1)...(139): AJ8A
MRLASFLSTTAVAIYFAVCSATADSDQTKVLMNGSPVHPHGSIGKRLLRAHQENDASTEERTPNFNLAELTKRNDAKKLADKLMGDHRLANAANIWWQHHEITLDKLDEFLKLASRKTQGRKYDQIYNGYTMHLGLSGV

SEQ ID NO: 79 - protein, 141 aa, Phytophthora palmivora
  VARIANT (1)...(141): L1A
MRLASFLSATVVAIYFAACSATTDFDQINVLMNGSPGHSHASTGKRLLRAHQENEASTEERTPNINFNLAQLTERADAKKLAKQLMGNDKLAKAAYIWWQHNGVTLTKLDDFLKLASRKTQGRKYDQIYNAYMMHLGYTGV

SEQ ID NO: 80 - protein, 138 aa, Phytophthora palmivora
  VARIANT (1)...(138): L3C
MRLASFLSTTVVAIYFAVCSATADSDQTKVLMNGSPVHPHGSIGKRLLRTHQDKEASAEERTPNFNLAELTKNKHAAALAEQLMGDHKLAKAAYVWWQHNQVTLTKLDEFLQLASKKTEANYNDIYNGYMMHLGLTGY

SEQ ID NO: 81 - protein, 139 aa, Phytophthora palmivora
  CONFLICT (1)...(139): L4C
MRLVSFLSATVVAIYFAACSATTDFDQINVLMNGSPGHSHASTGKRLLRAHQENEASTEERTPNFNLAELTKRNDAKKLADKLMGDHRLANAANIWWQHHEITLDKLDEFLKLASRKTQGRKYDQIYNGYTMHLGLTGV

SEQ ID NO: 82 - protein, 139 aa, Phytophthora palmivora
  VARIANT (1)...(139): L6C
MRLVSFLSATVVAIYFAACSATADFDQTEVFVNGSPVHPHGSTGKRLLRIHQEKEASTEERTPNFNLAELTKRNDAKKLADKLMGDHRLANAANIWWQHHEITLDKLDEFLKLASRKTQGRKYDQIYNGYTMHLGLTGV

SEQ ID NO: 83 - protein, 138 aa, Phytophthora palmivora
  VARIANT (1)...(138): L7B
MRLASFLSATVVAIYFAACSATTDFDQTKVLMNGSPVHPHDSTGKRLLRAHQENEISTEERTPSFNLAQLTKSKHAAALAEQLMGDHRLAKAAYVWWENNEVTLTKLDEFLKRASKKTKADYNDLYNGYMMHLGYTGV

SEQ ID NO: 84 - protein, 138 aa, Phytophthora palmivora
  VARIANT (1)...(138): L7C
MRLASFLSATVVAIYFAACSATADFDQTEVFVNGSPVHPHGSTGKRLLRAHQENEISTEERTPSFNLAELTKRNDAKKLADKLMGDHRLANAANIWWQHHEITLDKLDEFLKLASKKTKANYDQLYNGYMMHLGLTAY
